United States Patent Application Publication US 2006/0040262 A1 - sequence listing, part 9

SEQ ID NO: 902 - DNA, 90739 bp, Mus musculus
  misc_feature (1)...(90739): n = A,T,C or G
ctgagtggccagacgcacataacagcaatgtcaggctgtggtgtggcctgcgggagcaggtgagttgccagggtagggaagggacacatgcaagggaactgaggaaggtgggtcatggtcctgcacatccattctgaaactggagcagctgcaatcatccataccaggctcctagaggatcaggtatctgccattcccacgtaaagaggaatcatggaacccttaccctggcatccagacgctccatccatcctgtgataccatgtccctgctcatgaccaatccccagcgacacatgtgctacattacacacaagtcggggcttcatagggtggagcaggaccctcagcttttgagagcctcagcatgcttgggggaggcttcccagtcttgtcatttccggagagccacccgtgctcatgtaggtgccacagcatgctcattggctcgctggccttgggtagagtcctttggtctgttggtgcatgtctcctatcgccaatgaaaagacatacaatgggagggctcctctctttgactcttgaagagggtacagctcagagaggctaagcaattcagctgaggccacacagctataaatggctgaaaacaggaatgaacccaggccatcctgctgccatcagtgcagattctaggctatccctctctactctcatatcctgtggtaaataaattatacattattccccttacttctcccgggcgcctgtagcctggcataatttggctactgatcttatctgtgtgttcatgtatcttgacccacatgtatctgtgagtcaataagatttccacatcttgggccagagagatggctcagcggttaagaacactgactgctcttccagaggtcctgagttgaaatcccagcaaccacatggtggctcacaaccatctgtaatgggatctgatgccctcttctggtgtgtctgaagacggctacagtgtatttacatataataaataaataaataatttaaaaaaagatttccacatcttattgacccacagaccacagtggtggaaatcaaaaggaaatcagaaagatccatttcccagttccctgacccttgcatatcaaattcagctttcccatctgctgtcgctgtctgaacatgtcctcttcaaagggtggtcagggactcagcatgagccttcatcttccctgagagtgaggtgtgaggccccaagcagagcccaagctgtctgacctcattcatagcccccagaaaccttgtgccgtggtccacagaggctgttctgtccgagctttcagccacagggatgtcagccctaatgtccagcagaattagtctgcactgtggtctctgactccaaaggacagcctctggtggcatttcatggagtccacagaggaactggtccagatccttcttgcactggctgtgtgcagctttgcagacagacccttgttcccacaacaacctcttccctaatcattcactgttctcttcagagaggacacatagcttatttccagtttttttttttttatttgtggtgaaatacacccaagattgaatttactgtcttaaccattttaagagtgcaatccatggatgttaaatccaatctggtggctacacatctgccaccaccacctgcctgcatgacgccccttgtcaaaccacagatctagacccgttaacgagcaactcttcgtctctattccctgacccacacccccagctctgggccaccccgctccactgtctctacgtttttgaaccacttttaaattgtgatagtatgaagtgagaccagagatggggctcggtcgataaagtgctcgcctagaatgcacatggctctgggtgtcacccaccgcaattccagcactcaggaggcagaggctggacaaccagaagttcataactacccttgactacatggcaagctctaggccagcctgggctatctgagattctctgtctcaaatacacacacacacacacacacacacacacaagcacaaatgaatgcaaaacatgcttattgttaaaacaaaggatcagtgtagcgatgcctaggaaaatgtttatgtcccacactccacccaagccacaatccagtccagaacatgctgacagttatcatcaatgacctcctaggttcccagctatggagtgtgtgtgtgtgtgtgtgtgtgtgtgtgtgtgtgtgtgtgtgtttgtgactttgctattatcccaggatgtgcagagcccaggagcggccctactgaagctcacctcctacccttgcctcattacctttcccagggtcatatggaaaaatagaggtagcagagtgtcctccatcccacaggatggtcaagggaacctctgtgagaagtcttgttgttcatacgtgtacacaaagtcacaaggaagggttgtgactggcagggtgtgtcggcctttcacctagagaatgtatttatctagtgaaggctagctgggtggattaatcatcgttcccttacaaaagcaattggtgggtatgaaggcagtttccaccaccctcagttgttcaaggtagtgccgtccaaccaaccccccacatatgtgtctttatgcgtgtgcttgtcggtgttgacttgtgtgtactcctggggctgcagggccaccatgcactgtgggagacatgtcaagaggttcccctaacacataccttccagctgcattgacacctgtccattgactccgcatctccaacaacgaaagtgaccgtcattcttcactgtcaaccagttgagggaacagtgacctttagtggtgatctgtggtgattgctgagaccagcgtttttactgcttgaacgatgctgttgttttttttttttttcctccccgttttattccctgcttttacttattttattggaggtacttgctacatattgtgggtcatgacccttttttatgtgctgccaaatatctctgtgcctattttgttatcaagcattccatcctcaaatgaggaatattctggtgaaagagttggttggtggagcaagtaatgggagattaaactttcttttctccagaattataggacttaaacctcaagaattcaaaaatctgcaaatatttttataatttgctattttctttttttttaatctgtgtttggggaggggggttctgttctatggttacttaattttttggatagtcaaatgtattgaccttgaaagaacactgaagtccaactggggctttgaaagctactttccaatagcattacaaaaatcttccaacagccttggcattttcacgagcttgtttctaggtcatgtctgtttgcatgagatttcaaaaagggcctcactatgtagcccaggatggcctcaaacttgggattctcctgcctcagcctccccagtgctcaggttacaggcacatgctgccatgcctggtatcccagttggttctgaatcaagttatctaggaagaggaacctcagctgagaaaatgcctccatcagattgcctgtgggcaagtctggagtacattttcttgattaatgaatgatgtgtgagggcccagtatgctgggtggcaccatccctgggcaggcagtcctgagttgtctccgaaagcaggctgagctagccatggggaggaagccagtaggcagtgttctccatggcttctgcatcagcccctgcttacaggttcctaccccatgtaacctgagagctataaaatgaaataagtctttcccgcctaggttgctcttggccttggtgttcaccaaagcactggaaaccctacccgagactcctggctcatttataccttcaaccagtttcaccttctgggcatccgtggtgggggaaccctgcctgctctcgggtgccattctgccgtttacctccctcctggctctcagccaccacttcccatgtcacttacgtcattatctgtttgttctcctcatctggctggatgctcagctccacaaaggccaggaccctctctgcttcctgatgttcctatgtttttatttttatggtgctcgcagtacccagagcagtgtctgtctgacacatctcgggctcttctaagtacctagtgatcgaggggacacacgagctgtcccctttatttgaatactccaacctttctctggcagttgggaatcccctcttcggctgccctttcagcttctcctgtggttattggttggttcggcgtttctccttctccttctagttttgtgtaatatcattccctagaatatcgtcagttttcaaatgcattgtcgacgtacaaagctacattccaattctcttacatcttaaaaagtttgcatgtgtgcatctgtgaaagtcacctttctcagcgcttgtctgactttgcttttcgctctctgtctcatttgctggtcgcagtctcgggtgtccgtctccgccatcagggcacagcgatagcgtcgcacgcgtggctgctggtggctgcttcatgtgctttattctcttatgtttgctttgggctttattcatttcttccctttgggctattcagggtggtttttttttttttcaatacaagagattgaacccaaaagccttacatatcgtaggctggtggttctcagcctgtgagtcacacaaccctttcataggggttgcctaagaccatcagaaaacacaggtgtttatattaaatagtcataacagtagcaaactacagttatgaagaggcaatgatgataattttatggctagggggtcaccagaactgaggatctgttttacggggtcacacagctttaggaaggctgagaaccactgccccagacaaaggctctgcccctgagccacaatcccaaccccccagagtcttctattgtgttttgagacagtgccctgctgagttgcctgttctgctctccaacttgctatccccctgcctctgtggctaccacttcagctctggtgaaacccttaacctgcatctccttgtcccctctcctctcctctcatcacagaaagcatttgaggcttgcttttcctctgagcatagaatgacttgtgcccacaaccttccaaacagtaatgttctctttctctctccagttcccttagcttcggtcttgatgtcccctttattcaagtcacttagaaagtgtctcggcaccaccatgtgtgcctctgacttgctgttttgatttcgatacccagacgtcttctggctgttgcctggagagatgctctcaggatcttcgatgctcgcatgctttggaagtggagagttgtcttgccatatttgagcaaaaaggcatcttacctgtgtctggggtctgtgtaaagggatatgtatagactctgtccctgtgacttcttccctgagctgcttctgtgtcctatctacactcacaggtgacacccaggattcactctccctccctatgtagtccagactggttttgaactcacaatccctacctcgatcccctggccctgggatcactggtgtccaggcaccataatacccctgcttgccccacagttctatgattacactacctcatttgtctcattagggcaaaggccgggctctagcctatgccttcttgtggaaagaggcctcaagcaaacacaaaatgccctacttttctctgcccggcatttctgcttcattctgcagtgtgacctgccaggactctattaaagctcttgcctgcttaaccgttttctcttagatttctctcatcagtttgtcttatttccaaatatatggctgggtttatattttcttttaccatcctggtctcttagcttagaataagataattgaatctatttgcattattgaattcattaatacgcttggctctcttgacgtcattcctcacatctctgtttgttatccattttccttcccagctagctttagttttactgattcctgccatattgaataatctgtgtccctgctttctctcccatacttggcaattaagaagtctgtcttattttttccttgagaaatacccataaatcaaacatacgcatttgttcatatgaagaagtaagtttctgatttccagtagtgtgtccccatcctggcagatatttgtcccgaagccaccatgcacactctgcttgtatttctcctgttttctgttcttctatcttgtcctctctcgaatgacttattctgatactttttttgtttgattttgttttgctggagtaattccttgggtgacttaaagaaaagattaggtgctggcctctgattttagtatttctctctctctatttgaacctcaatggatctcagggggttttaagatccatttttccctcaagctgcaaagtctttaccctgtaacgcactggcagtcagggtaggagatatgaaacccagtgtgggctgcccagcttttattgtcatccagacacaacctcacctgggaagagggaaccccagttgaggaatttcccaggtcagatgagcttgttcatatctgtgagagactgttttgtttcaatgtgggagggtccagcccactatgagtggcaccatccctaggtagggaggtctgggctagaggagaaatgctaagcacaagacagcaagcgaggaggtggttttctgctccatgtttctgccttgggctccctgccttgaggtcctggcctggcttccctcaatgataaaccatgacctgaaagtgtaagatgaaatagatacttccctccccaagtttggttctgggtgttttattacagcaacagaaagcaaaccaggacaagtatcagtgtaggttctcaacatgaatacagagactttcaaatactagctttcccaatctcctcaagatagcgttcatggaagctgaggtgctccctgctctgggaagggagcacagcagctccacagagtatctggagtgtgtgtgaggtggggtggctctgctgaggattggctcacgattgtgtaagaactgtcgcacaacaacccgtgactggcagaaacggcaggcacggggtgctgaggccagaggagggaatcacaggaacttagtgtgtaaggtgctgagaaggggatggatctttccagaagcttctgtgatgtctgtcaatgtcatctgccccagccccagctactggctgaggtgtaggggacagaggtgtgtggccctggcatctagtgcttccctcccacccatattggtccctttggagactcagaggatgtgctcccaggctgaactttgtttcctgacttgggagtgggcctttcctattcccgcctaaagcagttggtgggatgcgattgggctttctgtggtccccactcctctgagtcctcagactttctggccagctggtatgactcaggatctcctccaatttgtaggctcttttttgttttagtggcattttcggggagaagaggcagaccactgagccctctctgtcatctagaaacttgggtcttggggatgacattctcaggtgactaatatgcagatgtagctggacagctactgaggaggactgtgagtggctggtgatgggatgacgaagccggtctccatgcttcagctcatcctaggtcctccacaagccacaccccctcatgaatcaaaaccatctcatgaccccagtccccgggcagctcaagtcctgcctcctcctctagcaaacctcttttcctgctgactcctgcttcggtcatgactcctcagtgtgcagtttcttgatggtccctgttcaggaggttcaagggctgagcttgaaacaccccccacatccagacaccatcagaatcgactccagtgtggttcctctgaagacaaggaccaaatcttgtccactttggcaactgctagccagctggacccattaaatgaatgaacgaccacgtcgggttctaaaaagaattgtcacacattgcgtgggggattcccgctaggggttgcatgtgattcagaggaaacctgtctgaatatcacaccgtctggaaggactctcagctcctggtgtctgcacagaggacacttgcttatcgaaagagaactgtagcaagcgggtgttgggtctcgtgggcggtggacctcatgtccagtgtggtgcgagtttgatgagtgggagaagcatctgaccaggtagacatgctgtgggggaggggtgtgatgtctgaaacagtctgaggagggcttggaggtggggcctggcctgtgggtgctctggggtctcggtgggaggtatcaggtactcctatttttttttttaatacttgcagtggactgggagatcagacttggagttgatgggacatggcaaagctgtgcaatgtctagatggctctgttggcagactcaaataagttaccacagggagccacagagccagtcctctctaccatgccactcttcggagttgaacagcagcaggtgtggtgagaggggacattggagacctcaggtgatctctgtgttctgtagcaatcatctgtgtggagtggttgccaaggacttacgttctcacaaagcatggtgccgaggacaagcaagaggacagtgccacaggcctatgtgcaggttaccccacattactacactccgctctgggacagagtccggggaaattatgtgggttgtgccacatgccaggcgttgttctcggcactgcgtgcacggtgactcaccaaagctcagaaagccctcaccattctcagcctccttttcacacacagtgacttcacacaccacggaggtcacaaagagaaggacgtggaccagaacctagggtatcagagccttagagatcacattctcagctctcacaccacaccatcagaagcagacaaaccggacggagagtccaaagagcgtggcatgcctaggacgctatgcggcacacagctaaacgactcgggttttctgctttaagaagtgctttcctctgagcttcctggtttgagccttatgacagctgccctggtgcctgagccacatcgcttgctcatccatccatctgctcaggaatctctctggagctcctgtcctgccctaggcttcccttggctcgaagagtgttttgtttagtaacttggaaaccacaatgcactcctttgccccccgcactgttccaagcatgttagttttcacttgggctagcagccccctcagggtaagtgattgtgcgccatacccatgggtcagcttgcttctataggtccctaggctgtaaccatgtccttaccactaaggcacccaatcacgtctgcagttggcttaggttggcattggatgtgggtaaactgaggagtcaaccctgctctggggagtgttatacctttccaatctcattcttggattgatgtaacctgagtccctgtggttggtgggggggctgaagttctgttcccttgctggttttcagatgggcagtccttccgagttgctagctgctgcctctgggtccttcccttccacatgatccttccaccttcaggccagcaagcgttcatagagtctgactgatgccagtccctctaacttgctcatctagaaccaaacagaaaactctacctttcaagtagacttccctcgagcctgttcaaggtcaaggatgccctgacacagaccccagtcatctgtcattgtccaaaaactgtactccaggatttggaaaccttgaggtccaccaggagccctgcccatccgcctggtaaaggatgacactcagggaagtttagcatagggcaaaggaatgtacagtgtatcatcccagagccactgtatcctactatctccctgaggggacatgggacagaaatgcaatttggagagagttcagggctgggataaagcagggattgttctgtacctaaaattgatctagaaaactccctgaccatggcttccgtcttccccacttttgtaggatcagaggcacaaaccaagctgcctcgaagtagctcatggaagactctggagagccgctggccaggcacgctaccccttcctcagggagaagcagcgtgtaagcagaggctttgtggccggagtggacatgaatgctggcttccagagagagcagcgcttcagttttggtcatcggaagtggtgcctgcagcgcaggtaagaagctccagtctggtttgccaactgccattttagctggctgtgttcttctcttaaaaccttctgtctggagagtggccatcacctgtccttgccttccctgacctctgacagagctggtctggaattccctggtgccttgattaggaattccagccttcccatgtctccgcccctcagtctccacctcacctctgctaaaggacacaacaatgtctcacaaggacccaggcctctgatatattaacctgtttcccaggcttgtccttccatgcccaatcctaagtcaccttcataccctgccctgtcataaagcccctgcccggaggcatggaagggtgtcaggtctggcctctcatgattacctggagagttccaaactctaggggctgagtacataggcaagtgaggtccctgggctcctatatgtgtttgcatgcatatctccatcttgggcgttaggagtgggctgtgacatgggtgggggtatggcatttggaagctctttgggtaagagttaaatcctagggtgttttgtctgctacaagctatgtcatcatcatcatccaaggagctggtagggctgaaggagagagcacctgctttcaaaaaggaaggaaggaaggaagggagggagggagggagggagggaggnnnnnnnnnnnnnnnnnnnnnnnnnnnnnnnnnnnnnnnnnnnnnnnnnnnnnnnnnnnnnnnnnnnnnnnnnnnnnnnnnnnnnnnnnnnnnnnnnnnnnnnnnnnnnnnnnnnnnnnnnnnnnnnnnnnnnnnnnnnnnnnnnnnnnnnnnnnnnnnnnnnnnnnnnnnnnnnnnnnnnnnnnnnnnnnnnnnnnnnnnnnnnnnnnnnnnnnnnnnnnnnnnnnnnnnnnnnnnnnnnnnnnnnnnnnnnnnnnnnnnnnnnnnnnnnnnnnnnnnnnnnnnnnnnnnnnnnnnnnnnnnnnnnnnnnnnnnnnnnnnnnnnnnnnnnnnnnnnnnnnnnnnnnnnnnnnnnnnnnnnnnnnnnnncttagagcaggcattttctcattgtgcagagccagggccggggatgtaagtcacctcatgggcagcattgctgcagctcacggatgggggtggatgggctttgatttcagccagcagctcctcagcacgcccagcccagcatgcctgtcctgaccagaagcgtcctgtggagatagaaaaacccccaagacccaagaaaaattaactacctgagcctcatttggatgggggatgtttacagtggtattgaacctggggctatccctgagttcaaatcccagcactaacagttactggtgttagtagattttaattaggtattttcctcgtttacatttccaatgctatcccaaaagtcccccatacccacccccagtagattttttttttttatggtttggaaacatgttatagctccctctcccttgcctcagtttcctctcttgcaacacaggagaaggtggtacctgcctcacaggggcaccacgcacatacagatgaggccttattaaaacacggaccacccacctggaagtccttcctaatatcccctactgtgcaggcaactcagccaccactcaccctgtgatagatctgctatgctgtaccacctggtactggcacaggaccctaaagtgaagggactggtcctctctatacacaaggcctggtacttcatagatgagtttaagtcctgaaaggaaaaagagaaaaatcctagtgaggctggccttgtttatcctttaaaatatgtatggacagacactgagcacagagaggttcagtcatttgaagacagtcacacagctcgcaggggtagaaactctgtctacaatgaatcaactcttttactgttccactgaaatgcttcctgaagaaaagactgtgagtcagttactcctcctccagcagtaagtggatgactagagtatgactggagagccccatcaccaagggtcccgttcctcggtctcctgcagcaccatctgctctattgactttgcatttgttttcaatggtgcacatgacaacttaactgcaagttggggggagggtccttctcctctagcagcctcagtgatcaaatacgtgaccagatattactttggaggtagattttgggtgtaataaacatttaaatcaataggctttggataatgccagttacacaacacagcaaggacaggcttcatctaataagttgtggaattcgaattccaccacagtggcgatgatatcagatctgccggtctactggccnnnnnnnnnnnnnnnnnnnngtgcacatgacaacttaactgcaagttggggggagggtccttctcctctagcagcctcagtgatctggtccacaaggtggacgtgggttcttgagtaacctagaactgaagctccgaggagcacaggcagtctgggggaccacccgggactctaccactcctggcatgtgccctcccctacttcatgcccaaattcctagtagtccacatggactctgacagctgggggatggggggacaatctgcagagggagccctgcccagcagcaaatgagcctcagctccagccagaaatctggccccgccgcttcccgcactctccctggggaagaaagcacagtgattaatggagttctgactcagagctgctgggggatccaggagatcataggcacagctggcccactaggaagtgggctgggctatgtggcatccatgcagatgaaggatgagggtccaggatggcaggtgtgcagtgtggcagcctccactatgccagggatccagttagctggggacacctgggctcccagcagggcttggagtcatgcaaggtaaccaggagtctcctcaggagacctaacctgggcccatctccagaataaggtgatttctgaatgagtggctgcaggccagaactaacatgaaactgaattgggaaatgttttcccagcaaacaccactgccactggttttcaaattttcattgtctgagaagccatttaaaatgtcgtatcttgtatgaaatgatgatttaatgatcaggataaagcgagtttattctttaatctttttttaagtttcaatctttaaaatggatttattatgaaagttcacacatagagtaataactatgctttgatttacaaaactttgacattttagactagggatccacaagctaagacctgtggccaccgcctgattgtgtaaataaagctttattgaaaaacatgctgttcgttcacatgcacagcagctttggctgcttccgcctatctaccctcaaagtctgagcaatagactctggcctttcgcagccactgtgctgactgcagtcctaggcatccacgatctttcttgtcagctgcagcttccccgtggccttctcttgtcttggttggcttgctaaggattaagaattaaggaattcaaaggttagaagatggataaatcacttgtcccaaaggcacaaggaccagagttcagagccccagcacacatgtaaaaacctgggcaggtgtgtggccacctgtaaagcaagcgtttggaaggcagagacagggactctccttggcaagatggctagctacactaagcagactcggcaagtttctgattcactgggagaccctgcctcagtaaacaaagtgggaagtatcaagaaagacagatgacacccacgtagggcctctgcatacttcacacatacacgtacaagtatacacacacacacacacacacacacacacacaccatgaaaaaaaggttaaaactaggaggctggaaacccttagtggttaaagcacttgtgcatgcatgaggtctggagtttaggtccccagaacccatgggaatgtcagtgagtgtggcagccccttacgtaattccagccttggacagtggaaatgggatcccatgggcaatctggttagtgagattagccaccttgatgggctctggttttgatggagagattctacttcactgaatgagatagaaaagtgactgaaaatgatttttgatgtcaatcttgagcctctgtatgtgtggctacacacatataaatacacacacacatacacagagagagagagagagacagagacagagagagacagagagaattacaaagaaaacaatccaaagtcatttcaatagaagatataagggttgcattttccactgtgtactcatctgtgctatggggcattccacgtggactacaggagttccggtttgcatcatcaacagtatccaacagctgtttgaattccttcttgctacaaatgccattcagacaggaggcccacactctccatacttgggaacttaaccttgtggctctgtcccttgtcaatgcctgtgtagactttcaaacctatagattcaatcctgaatctatccagcagaacaaaggcacccaggaaagagttcaaactcatctcagccctgtaggtcagtcttccctgaccccattccaaagtgcatcccagccagcctaagctggggacgctttcccagtgctgcagtgcactggggaatgtgttaaaactggtccactttctggaacagtgctgataggagccaaaatgtatttttagcatttatgctgtagtgattggagagccacctctgaaagggctttagtggaacacagtctgagactgccctcagcaagaattggctgctcttattccactgcttaaggataatggaagagtaaaaggatgctgagtgtcctgttgagaggcctaagggaagggaaggagaggtagaggaagggagcgagagatcgtgggagcaatgggcagagagtcaagtccagtcttccagcaacaccagaggccctgtgactcctagcaaggcttctaatgtctccaaagttaagctctccagctgccttcatgacttacagctgcccacagagggcaaggtgcagatgcacttggggacagatgacaatgcacagagataaggaatggggacattaacagcctcttctggtacacctgtcagggccccactggctatgtagaaggtcatgctgtatcgaagggaaaggaacagcttcccttggagttcccaagctgttccttctgtatgcatttccatccccccccccacacacacacactgtgcccttcctccatggagtcagggcattaggaacctttgctacagggttctgaggaaccctgccttcatgtctgctctgattgtacgtgcagatttaagagcctccaggtggggtggcatctgtcacctctgcaccccaagtggtgctgcaaaggtttctggggggtagttagtgagcacaggtcattggatacaatgatctgtgaatgtggatgctttacaagtgatgaagggacaggtgtcagggtctagagaagaaggaggtgggctagggattgggcagtagctccaagcatttagccaaagcccacagagccaggaataaaaaccaggagtcctgacttccagaccagctgctgttgcctccatgggtgtgaggaagggaaggccaggcctggtggcttgggacactgtggactagcgagtccaccccctccccacagagaagacatttttaggttttgaagagatgacctcatgtttttcttatttacatagcctggattgtttatgtagtcatttaaaaataaccaatgtgtactaagcttagtctttgctctccaggctctggtggaagagccactgtgtggggagagacacctttttatctaagaaagggacagccttgtttcccaggacagacgggggcagaacaggacaggtaggaagcttcgtggttttttcctgtcgcttctccaaaataactccactcctgcttcccacttctggcctgactggacccagggtaggtctccttccgggcagctatgctctgtagattctccaggagctgttaggaagtctgtcaacaagcacatgcgctggatctgaagacctagattgtggcctggagggttccactcaagctggaccactggccctgcagctgagctgtgtgccattggacaggctacttaacctctctgtgctgggtcaaacagagagacaacagtgcagatgggagcagttcctgtgagaattaaatcaagaaacatatgtgaagggcctggctcattctgggtacatagtagcaacacatagtgtgtcttcgtaaaaagtaaccatgtttcctttgacatcttttgagaagaacaaactccatgctgggctcaggtggtgacagacaggctgacctggctgaggagtggaatacactcgctagagcagaagagcactaaggagttggagctttgtctcataagtcacatctccgagcatcgtccacagacggccatctccctctccccctcccctgctcctccctatacacacacacactcccgaattgcctaggtacttctttaacgggcagatctcaggctctgtctcagactaggggctaggaggctgcagtgagaggagctagaggcacggttatctgtcagaagaagactgtgatatttgcctgcagatgttgactgagatcaacatctcagatcagtgtcacctgtaagaggtgggtggtgggcctcgcctgccagactgatgttaggggagggagaatgaggcctcctcatgagaacagagaagggtagccaagctcgggcagagcaagtgacttgcccagggccacactgttaataagtgcagacatggggcatgctgattctggagtaggcttcctcttgtggtgccaagtggaggtgaccctggaagagccattgatcaatagacaggaaggcgaaaggtgagttttatgcaagcataatgaatttgagaggctagagggtgcagcagctggaaatgcagaggggtgtggggtgccaggcagatgggcaggcaggtggataagcaggcagatgagagagcaggtgaggtgtgcagctgcaggaattgctaaggaaaacaggaagaaatgagcctgggagacaagcagggtggaggggtgggggctgacaaaggaagccggagggaggaacaagcctcctgtgaagcaagtcaggtaagagacagaagagacagaccagggctcagagaggtgagaacaggacagggtggggtgcgcaggaaagatgggcggcaccgcaggtcacccagggaacttgctttgggcaccgctttagaaggaagccagccaagctgaaggaaactgtgccataagtaaataaaaatgtcaatcacgtggggcagggaggagagttgctgtttgcttgtgactgtgctcctggccggcatgggtgcagaaccacccaagtctcctgtcaggacaagctctgccatcttgcccccgttccggcactgttggctggtgccctggaattatccttcctgtcctctgctggacgggcctcagcaccatcctttccctccctccccagcctctcatttcatttggcagctgtcagtgggagcaaagcttgtccaaagggtttcgactgccgggccacccactggagagttagttatacagactcgggagattcccgggctgctaaatccaagaaagggtgtgccaggcaggcggggctgtcccagcagctcattctgagcagcctctctggggctgcctctgtaatcttgctctgtttgggggcatctgggtctaggtctggaaaatgggcccaaggccctgagagccacgtctagcactagcctctcagaacacaacaccacctgtcttcccttgatcctacacatggactaaaaaccaaactccttccctcccaacacaacactcacagggacacactgccacagtcagataggcaggctttcctgacatgcagcctgttagatacaaggtgacaagcactgatcctagtgacaaaacagaatgcctgtctctccatattccagtagagaacatagagtggggagttgaggacctgagtttggttcccagcacaaaccttcatacacacacatatacacagtcatatactcgtgctcacacatacatgtatgcacacacatgctcatacacaggcatgctcatatacacatgctcacacatgcatgcacatacctgtgtacacatacacgctcacacacactcgtatacacatgctcacatgtgcatgtgcacacatacacacacaacacacaaagaaaaggtaaacacttacacacttataatatttgtgagttcttgcagatataaaggtgcacacaataaataggtatgctttccttaagtagaacagagcccaccagggtcagctgtgcagtgagaaggtggcatggggttagcagatcatggtaagttgggccaggcagcgacctgagcaggcatcaagcagcctgggtgggtagtgtctgagtatggaaccaagggaagtgtgggtgccagttctgtggacagctgggcagagcccggggcagaggtgacaggaacaggaggtcacagtatgactggagggagaggcagtggagagcagttcacacggagcagcctgggaggtctgagctgagctgagggagcggtgaatgtgctgtggcccacctgctgtggcgtggggacacctgcattagggtggggtagagtgacagcaagaggtccgtgcctgaatgacacagatgagcacagctactgcaaaggccatgctggggcaggtctctggacagtgtgggatcccaccagcatgattcactgagatggacactaggcacagaagagatttttattattattatatatttttttaaaccaggaaagcccaccaacattcacatgcagtggtacttctcaggctagtcagtgtcaccaagcctcagcttacttatctgcaaaatggatctctggatagatagttccaagatcattaaaaagccactccttcagtctctggctctggggcctgtagtgatcagggaaggctttgaggaagtaggtggaccctgttcttaggaatgacttagaccaggtccaactaacaaggaaatggagaaaagagcagccaggcagaaaggccatgagaccaggagcataagctcggagcaccgggctggttgggaaggaggggaccaggaactattaacagacagacggcccccagctccccagtaccacagcctttaaagcagacctgcggggcctggggcctggggcctgggtttgttttgtgagcactgtggtcctccatttttaacattttcagacagacgtgctcaatcaggaaggaataaagcctggcttctggtccgccagagagttaacctcctggcctggcactgcataaccacagggtctgctgagcgcaaggagactcttctgtgtggcagccagagcggcaagcctggtggctctgggctctggcactgtcctgcagtggaacaaacagacctcccttcatagataatggcctcattgagtattgtgcccgtggccagtgcccagcactgggcagctcagcctgggtaagtttcctctcttggctgcttagcaaaatatttacactatgcctttctagtaagacagttcctgggagccagcaaacagagggagctagagaaaacccctcactccccatttcacccccacacccaccagggacctgctttccatagtgggggaaggctttgccacatacccagcatgtgtgtctggctccattgttgctcctcagggttccattgtgaagcaggacctagagctagaagaagctagaaggcctggccagcttcacttttctttctcctagtatcctcactagaagaacgtctgcctgatcttaagaggcaaacatgatgtggctggttgctactatcttccctactgctgctgcgctctctctctctctctnnnnnnnnnnnnnnnnnnnntctcctctctccccctctctctctcctctctccctcttcctctccctccctctctctctctcccctctccccctctctctcctctctctctctctcctctctctctctctctctctctctctctctctctctctctctctctcctctctgtgtgtactctgtgtggtagggggctttcaatgagaaaagagggtacattaccgccagctcactgctgatagtgcctgtcctcccaaaaggtccctgaaccagccaggggaacattcaccatgttgtcagaggaaaagggggcagtatctctgtcctcgacccagcagaaaagaggtcagagatggcctgtgtggtcctttggacagaatcaaaaccagtgagcaagcaccacatggctcatcaataagaagttgccttgagcattaggccccatcactgcggtacacaagacacacatcctctccggcccaggatcctacttcttccaggaatctggcttgtgaaacaacagcaccagcatgtaaagatgtgtgtgcaaaagatgtttgctgcaaaattccagaggcaaacgaacaaaagaaaatggttataaaaactcaaaagcaaagtcaagctcaaaggcactgcattccaagcctcccctgccgctcagcagtagcaggcagactatgagcctacttagaaaggcagtgtcacgccctggtgctggcttcccccagcctctgcggagctttccatggactcaggtgaagcccatgcctttttacccagggttcttccctgttaggctccttcagtagtaatctatcctttggtctcatcaatcccatcttacaggaaagaaaccacaactgagacccagcacttgccttgttatggcctggtgttgttggcaggcccgtcactcccctgggtcctggcactacctgacaaatgcagactttaacccaggtgctgcaacggggcagctgaactctcgtggtacggaggggaagccacatagcaacagccaagtgataagagcgaggcaaccagcctggagggagaaagtgggcttgacattcataaggtgtcacacgccccaggcaggcctcagggactagggcctggacatggaacattagtagaacatgagagacttgggaactgggtcagaattctttatgttaacagcaatttacttaattcaataaaaagtggtgctcttggtattcctggaatccctattgcttagaaggaggctgtgtttaagccagacagactcaagtcagtgtgaataacagtaacagtatacagtgggatgcatttctgatgggacccagaatggagatctccagctggcacagtgtcccaaacatgagctaatgccttaaggacaaactcacaggacattcttacaccctaggaaagccagatgcctaacacagagctggcatgaaatccagggaaggagaggtaggtggtggcttaatgaatggcttccaacttaaaataaccgggaagaaattgccttcttcatatcccagagccaaggagcactctgtccgcctgtggtcgggacactgagaccgtggcgctagctaggtagcacttctttgactaccagagagctgcacagtagagttaccatgaggggcattctgcttgctcacctgccattttcttctccctctggtctagatcttagatctcccagcttccctgagctgatcgagcctctgtgagtgagttgcaactgcagatcgataaatatggaattagctaattgatcaggtcatgacagacagcaaagagccaaagccttcttggctctgcttggtttattggggttttctgttaggagctcttctgttgaaaggatgcctgggctagagagggcattgaacaattggggtagtcagtgtatgtcatgcacccccaaatatgaaccaaccaatgagcttttagttcctctgagaggtaaggctcctcaccgagacccatatcgacaggctccaagctgctggcctttggtgccccgtctcctcaccaggtaaccagatcgttaggttcttttctctatggtctcagaccccagaggatactccgactacagtccatcagctcctaatcaccttcatcctgcagttcagtctccaggacccatatgtggaagaagaggattgattcctgcaggctgtcctctgacctctgtccaccacgacacatgcacatacatgagcacacaaacacaatgagggaatcaaaataataataataataataataataataataataataataataataataataaaagtgataaagggtatacattaataaaggatgaattttatggtatattattgcgtatcagtttatcccaaagtaaataatacttctaaagagtcacatttatggaaaagagactaggtcaaaatttagaaaaatttccagaagtggtggcacacacctttaatcacagcacagagcaggtgggtctcagtgagttcaaggccagtctgacatacacaatgagttccagaatagccagggctacacagagagactctgtctcagaacacaaagaaaagaatttaggaaattctacgtattaacagattaacatacccccttgttttggaaatcaagggttcggaattgaggtgacttttacaaactgtccgctctctgacatttccctttcttcatctacccattcattcccaaacacctacgcgtgcctgctcagtgtcagaacaagaaggtgattcagacacaggtccctccaacttctgtgaaaataatgagacgagtgcatgaacagtcacaagccacccccacgcgtgtgtgccacctatcactgagagcttctactgaagtgttgaatctcagcagctcatctcacagaagtggggagaagcatgggagttaccagagagtcagcagtcaggggagggacgtgatcagtgggaccagatcacagaagagctcctgggactctgtcatatggcagggtgactccagtcaagagtatgtaatgtgcatttcggaatagctagccagaggattctgaattctcttcatcatgaagaaggggtaacagaggtgcgggatggggtgatgatctgtgaccatagcattgtatgtatacagatcattaacactgtatgtaaacatcacaccgtagctgataaatatataaaattatatggcaaataaagtcaaatgtaggccaaaaagcattggcagctgtcattaccacaaacaggtgctgtaaaagacctaggctcgaaggtcaggtcccctggggcagtggttctcaaccttcctagtgctctgagtgaaggggcccagctccgttaccactcaagtgcaaagatgagaggtggctggtgccctggtgccctgcagggggtctgcggtggtcccgactccaagcccttgtggggtcatttctcatctccgctaactaccagcataccatactagttcaggctcaggacaggagagggagccagagatgagtcagatgccagacaggacccaggaaacatttggagtcttcagggagactgggactgtggagatacccagattcgtcccagctactgctgcctctgtcccctcatctgcacagtgggtgctaaggctctgcccaggagactgttgaaaagaactcaaaaggtctgatgtgatgcctagacagtgtgcttacaatctaaggacagacaaagttgtcatcaactggttccctcctaggaatgaatttaggtggaaacaagtgagactggtcagtgaacgctaaattactacactaattcaaggtaggaatgccctggttatcactggtgtcatggagtagtaggcctatccccatggagaaggggacagtggtggcctcaaggagaaattggtgacaagttggttttatctggagaaagaaaggaagaatggggaacaggcagctgtcagggaggggctggtcccctagcaggtagacagaaaggatagaggggctaggatgtgatttagaggtaggaggaaggaagcttggagatgacagggctggggtggacacactcgatggagtaacttgaggagaggcaggaaggtgggacaagctgagccagagcatcagtactcataagcactgagatccggcaggaagccggggccagggggagtcccactggggtaagccaggctggggataagaaggacccaaaatgtcttggcagattagacctcagaatccaactgtacaaagcaccctctttctcactgggggtggacctaactgggttgtcacctacctaactgggtaaccttcaggataggggcaaagccgggtctctggccaccgaaactcatacacaacgctgcagttttccccacgtttccttgcagatgtaaaggggtggtaacagcacactacacagccacctgtagactcctggcctcttgattaattgagtgtgaacctgtggacacgtacatgaccttagcttcctcatctgtaaaactgacttagaaacacaatctactgcacagacttgaggactgagtgtgccttgggtgcttagcagtggcatgctggctctcatcagctagccagcccatcagctagctaaccaatcagctagccagcccgtcaactagccagccatcagctagccagcccatcagctagctaaccaatcagctagccagcccatcagctagctaaccaatcagctagccagcccatcagctagccaggcatcagctagccagcccatcagctagccagccaatcagctagctaactaatcagctagccagcccatcagctagccagcccatcagctagccagccatgagctagccagcccatcagctagctaaccaatcagctagccagccaatcagctactcaacccaacagctagccagcccatcagctagccagtcaccttgctactggcctagctgctctgcagtttgttgttaggtacactccatctttcttaaaccaccagaccttcttcaacaggctgtctatttttttttctcctggtttgtcttgggcctgtcacagtagagaaaccaggttaatgttgtgatccatcgaattctcatttagattcattcattcatctgttcataatgcaatgggcaaccagcagcctgtgcttggggcattgggaaacacagagaattcccacagtgtacatctttggccccaggatcctcccacagcctatggcctttgccagagtagaattttcaaaatcacttggcttgggtggccaaaggatgtgtgtgtgtgtgtgtgtgtgtgtgtgtgtgtgtgtgtgtgtgtgtgtatttaaagcctcagaaaaccatacaggactccagcctcctgccccatgaggacagagcagaagttggaggaaaactgagaactgctcctgatggcatggcctgtctctaggggcttttagaactccaaagttgtcaaaacagaaagatctgggtcagggcctgaagtgagagttcttgacccaaaaataaggttggaattcagtatttattaagattaactgaagtcccatgggcctcaaggagctgtcctggctgtgccttggcccatggaatcctctacaatattacacttggggacaccaggccactcagtgtgaggcctgaggtaccactccttgcctgctgtcagcatcctgtaccatcttccacacagctggtttttagaaatcgctcttcttgcccctccttggcatctctacagcatcccctttaaaaagatagatggaagctccctctctccaccctgggaacccatgcccctgtcaggtaccagcttcagccttcttgttctcccagattcacccatcctttgatagacgccatctgtgcttctgcaaggcacatgaatgagatgagctgccctgccctacgctaaaagaactcactgtgcacggagagaaaagatctgaacaaataaggttccacctgtgagtaacaagagagagggcaccatgctcacagaatagagactccgggaggtcaggaaagctcggtggagaatgtgaggatggaatagcgtgttcatccgagtcctctgggaagcagaactaaaaggacagggacacacatgtgcacagccttataatacagataagcaaaaacaagcttgacattggcaacgagactggtgggtacaagaaactatagcttgtgacaaaggaaggagaagtacctgagatcgtaatagcatccactgtgtcaggcactggagacagggtcctccagacagtcccagaagaggaacaggggaaagaaagtgacactaagagggacagtaaggatggtgtcctttggctcctatagttgagattcagtaagtgcacagggtctggggggcagctccccatgacctgcagggcatagggtagtctgccagctgtcacttcaattgattcatcaggcccacccacgttatcaaaggtattctgcttcatgcaaagtctggatttaaatgttattctcacccgaaaaataacttcacaaaatcttctagaatgctgtttaatgaatatccaggaccatgacctatccaaactgacgtaggagattaactagcagggggatatgaaggatattgaggagtttgccactctgtcggagagacaaagaacatgacagccaactgaagcatcagcttatgctgggaacattctgaagtttacacagaaagggagggaacggagaggggtgttagagatacagccctgtggaagagacctggagactcagcaattaggcctgcctaaaatgagctttacagagtcctaaactgaggagtcagttatgcctcgaacagcctccagagcagcagctctcaggctttggcgaacctctgtctccaaaaatattgactttaagattcttaagagtaagaaaattagccatgaaataacaatggaaataactttatgatgggggggggtccccacaacaggaggaactatacttatgggtctggaacctgggatggaaacccttcccctccactacacctggtagacagcacactgactctcagttcccgtggctggcagaggatggaacctgactcataggctcctccgaaggccatccctgagacagagaggggaagaccagcgtgtcatgtgtcttgatcagtctgaactctgatgtcaggctcctgggagagcagggacccaggtgtgggagcatcagctgtgccacgaggtagacacctcagggttctgagatgatgcctctccagtagaagaccctctttccttttggtgtcctcactgctggagttccagcttctccctaggagtcatcatgacaagtagagaaggcattttccaaagaatgacatcacaatagctttgaaaacaagatagggagcctccccatgggccatgaatatgcaaagtcttaagaaaataggatacacatgagatgggtaaatagaaccagagccaaaagcatcacaacccagaacccagacatctaagtgatttccatcccagagatgccagccatagttcatgccaaacatcaacaaaggcaagagttggactggctgctatgccctccccacttcagaaagggaggttaggcccctcccataatgtgctgttcaggcagagacagccaaatcccatggagctaagtctcaaggccattctaagaggctaggggtgggtttagccgactccagaagatagtgtggggcagagagtgtataggtcactcactctcacatgaagcataccgcactggccacagaaacattcttggacaatagaatgtttgctgccaaacttcccataagtgggcctcactgggagacttgcttcacattctcacaaatgtccctgacatggcttccccatcccgttcaggcgtaacctgtcaagcagagagccagtactacaggaagcctagtgtggttgatgatttcatcagaatcctccctcttttctgtggtgtgagagatctgagcagaccccagggccagccagctaaagaccacaggtcctgtccttccggggagtgaggtgtgaccttgtgctagggtgagctgaaaagacctgcagtcccttctcaagcctctcactacgatgtggatatggtggtgggaacgggtagccatgcagtgttggggacaaaagagaaggcttaactatgctcttaccactcctcagctgacagaccagccctggcctctggcactctgaccatcacattagacgggagtaaatttctatcttgtctccactcctccttatgggagctcaagtccttacctcatgcaagcactgactttctagtgcagtccctgatgcataaccaagaccaccaaacagagaaccaataacatgaaagagaagaccaggatgcaaagaccagtgaaggcccatcccaggttagagccacctaagataaatcaaattagtgtgcttagcaataatgataatttattccattttaaaccatttttattatttctaatggtgtatatatgtctgtatctatgtctgtgtctgtgaacgtgactgcaggtgcccttggaggccatgagccagaggagtcagagcccctggaaacttgtctggtatgagttctgggaatcaaactcagatcctcttcaagaacagtgcccattaaccactggccatgtgtctccagccaagtttattttattaacttaaaggagccagtttctgtgaaaataggacgatgagagaaaaggaaatagttgtggaaattttaaaaatgtgacacctgagaaaatgttaataggtaaactgtatgacgcaatgggcgtgggtaaagaccaggtgacctggaagtcaaaaccaagaaaatcagttggtttttttctggtggtggtgaaggggaattgagaactaataaaattcagtatcaatcaaagaggagagcaagaagtaagccctcagacaatggggtaaagatgaagaatggctagaagcgcaaagtatgtagcctaagaaatgttctacaagttaaagaaatgtactcaggttttagacaaggaagagaacatggattcaggacagaactcagtataactgaacattccaattcattttggtgaaactccagagaaagaaaaaaataaaaaatatgtaggaatttatcgtgagtaatacaagacactctagccaagcattctgggcagtctttcaaaagtttggaagacaggactttgaggctaagagtcttactgtgtcaaatttagataggaaaataaaaacgtgttttacaaatgggaattgggaaagtttaccacagccccctatgctttctaggggaaaaaatggatctatacctatcaatcaaaaatttttgcaatattttgtaatttttgtcatttagaaagtctctaagacaaaaaaaatgtgttaagacaaagcagaatgaaacaaaaatgtctactaaaataccactgaattggaagctatttgcaattgctacccactggcttgggaaaatcaattttcttcaatgcaatgtgactggggacatcaaccactctccagagcaggcccatgtccaggaggaactggccaacaccaaatcaaaaacatttttaaagaatccaaaattgtgatgctattagattgaagaggcgaatggagaaaactgtaaatatttgtgacaaagtttccttgctgtagagtcacttgggcccattcacaccagctggtcccaagggcatgaatgataatacattcatcatcaagttgtgtaatcacttctcctagttgaattattctataggctaagttataatatggaagtgaacatgggtgtagggacactggacagtgtagataaagatacaatgaaagcatgaaggcagacaagagagtaaggctcagagagagctgggaactttcattgttcatagaataacttaggtgaatgttgggggagagccaatgcaaacctcccctcagactcagaaccagagtccagtgtggatggcttaattctatggattagaaagcattgtatgtggggaaaattaacagttgtagacgaaacagcccctagatcacagcagtactctctggtcttgatgcatttgtgattctgaacattggctgcatcatgatgatctgagcctcgaatgccccatcaacgtatgattttggaggagttcatttaagtagacagagagaaagctgattgcatctgtgtccctggcctcgtataccaactcctgaaccctaaaaaccttatgcacacacaacactggacaaacacccagcatgctcaccctactgagccacctgtcgtcttctgacctcgcccacagctacttcccctttctccttggtgcaatcccactttttcttcagtctggtgtatatctccataaagccatgcttgtaatccccaccagctctcgattacgggtgcaaagttcatgcctttttaaagcttgaggcataacatacacaaaattataaatacacaagcataagccttataatagttgttgtatgtgtgtatgtatatatgtgtgttatgtaataaatatttaactacatcaaagtgtagagcatttgtcagcccagaaagctacttcccaacaaagagagagagagagagagagagagagagagagagagagagagagagagagagagaactgatctgctttgtaaggacataaaacagtctttatctacattcaatatatgtagatgctggtagtcgattgtttataagttccctcacttgctactgtatccggaagacctaggttattttttatgttatgttatttatttattatacagggttctgcctatatgtatgtctgcacaccagaagaaggcaacagatctaattatagatgattatgagccaccatgtgtttctggggattgaacttgtgacctctggaagagcagccaatgttcttaacctctgagctatctctacaggccctgagacctaggtttttaatcctataccactgctttgttcttttctattactatgtaataattacagtgtgaataccaacatttatttatccatttgatttactattgccatttagattgtccccatgtttttgctgaagaaaattgctttatttttgttattatttttagtatacaaatacatatattttggtagaatatatccccaggaatggaaattctgattcagaggtaggtgtgcttagcattagcttttgccaaccaagtagtaaacaaagtgtttgttctcctggcctagagactggccatccttagtgccagtttggttgtttcatgttagggcttctagtagttaggtggttggtttactgtgtagttcccaactgagtttgttggttttctcttcacatgcgttaatgctctgctttcaatcatggatccaatatgaatttgggagaaatagaaacaaatgacagtactataagctatatagacttcaccgatacacagtgttccacctcagctagacaagatagagctcaaggtactagtattctccctgagatagtgtttgccagagatagacctcacagatacagtgttttactgcagacagactggagagacatcacagatacacgggggttttaccttaggcagaccagatagacttcatagatacacagtattcaatctcaggtagacaagtcctaatagattcaaagtattctacttcaggtagaccagatagtctagatagatgcactgtgttctaccttgaggactggtgagagggcttaacaggtaaagatgcttgctgccctagcctagaaacgtgagttctatccttagaacccatataaaagtggagaagaggactggctacataaggttgctcccccaacatctaccatacatgcataatggcatgcactcatcatgcactgattattattacatatgataaatttagtaagcgctcaatatacaaaatcatagaaataagttacttgtctatacactggcaatgatctatcttaaaagtaaggtaggaaaacaatatcatttgcagtggtacacaaaacaataatatagttaggaataaacttaaccaaggaaaggaaagagttatataccaaaaccaaaaaaattctcattaagaaaaattgaagacccaaatgtaaaggcatcttgcatctcatgttcatgaactagaagaattaatgttgtttaatttccatactgtcctaagaaatctacagatttggtgtataaacatactaacatgctctttacaggaatagataaaacccaattttatatatatatgaaaatccctatgaaaaactaaatcctgaagaaaaataagaaagctggaaacaatgcacctcttggttgcaaattatgttacaaagatacagtaatcaaagcagtacagtattaggcatatagaccagtgaaacagaatagagatctcaaaataaacccatacatctatggccacccatcttttgccaagaatacacaatgatgtattcatatccacatatggagaaatgagactgaagctttaccttatatcacacctacaaaaatcaactcaaagtggattaaggacttaaatgtaaaacctagaattggatctcaccgtcacacaggagaaaaacttcatggcacaatcagattggctgttgagttgagctccttcctgatcctattaaaagcattgctgtttgggggtgggggtggggctcgggagatgacccgatgggtgatgtgattgttgcacgggcatgaggacctcagtttgggttttcagctcccacataaagagctagaacaggaggtgtgcgcctgtaattgcagtgccagggaggcggagctaggggtggggggagggagaggcatgatctcccatttgaactcagagcttgcatattgggctagtctcgccagcctgtcctgggggggggggggtctcccgtttccacctcctgaggtctggggttacagccagcctgcctgacatttacgtgggtgctttacctgctgagccatttccacactcttcctttctttcttgatagaagctatcctaactaacgtgggtgagaggggattggattctgggcttgagttccttttctctaataatcagacctgctggacatctttccctgtgcttattggttatttgaagaacttcagagacgtctgctggagtcctgtggtcattttaaaagcagaagtccttgcttttgttgttgctgattcgtaggcattctttactgcatggaacttactctgtcagagctataactacagctatgtcctctcagtctgcaggcttttcaccctcttctgatttgaccattgacgtgtaggggtcactgatctcaatgctgtccagtttaatctttttgacttttttgctttgtgttatatttaaaatatcattactagttccaacatcacaaggcttttcctgtatgttttcttctaagggttttatagttttggctttgtgttgaggtcttgtttccaatttgagttgacttaggccgttttcagttggactggccctgtatgaggagttccgtggaacatttgagatggagcagataaataaaacatgttgcagagtggtcatgactgcatgccactgcaaggacagtaatgtccacctgccacacaggcatgaagagagagactgtaggcagtgcccttgttcactgtgggcatagtcaacaacagtgatctgcccttctagtatacttataggatgtgtgtgcttctatgcctgtgcgcccactcacatgcctgtgtgtatatgtatgcctgtgtatgtgtgtgtgtgtgtgtgtgtgtgtgtgtgtgtgtgtgtgtgtgtgtgatgttgtagtgtgttctttccttaattaaaaaattatctatctactgtgtgtatatgagtgagcacatgtgtaccatggacaatttgtgaaacttggttctctccttctgccgtgtagattccagaaattgacctcaggtgatctggcttggcaccaagtacccctacccactgagccatcttgccactggccctgttgtcccatgtcctatatatgtcccttcatggtagacagaagaaccctaactacttaggcagctttttgtaccaatgtcacttaaacaaaatgtggtcaaaagacagctggagacctactgggcgctgacaagcatacaggctgctgtagaatccagatctgttccaggcagtgatcctggcagagcacagtagccagaagatacgagtctgacccggtctcctgacaggttctagtcttccccagggtgtcctcagtagcacttcctggcccattgaagataagtaggtcggcttaagttcacaagtgcccactgagttctctcggtgtccagacatggctttggatgcttctagggaaggcagataaaaataaatgacaaggcaggagggcagcatgctaactaggtggataacaatgggcaacccagtggatgaattagccccaagcatctgggctctgctgggcccctgctgatatgagctgcgaccccaatgctggctcattttcagcatcactggagcaagacatcagcatggcagacacttttccaggtaaaataaaacacacagaagttcttaacaaggccagccctcatggcgggaagaaaggctgctgggagtggtatgctttgccctcagagttagagcttgagtcctgtctgcaaggctgtgtggcccgggccctgcagggtctccattgcagaaggcacctggtagccctgactcagctgtaggctcggctccttggcagctttgtgattttatacctcggtttcctaatatgtaagacaggcatgataaaggcgggtggtggcggagttgttgtaaggaacaaatgggttgatttatttaaatcccctcaggacagtcctgacatgagcgggaattttagggcccagtccagactcagaacctgagcatatgccatcgctgcctcttgtcactgtgccagtgccccagggtgacgtaagcaggacagcaagttctagctttctacctgctccataaaggctggggatcttgtttctgatttctgcatgtcaacaccagagacgtccatgtcaacctctctggtaataatagtgtcaccttggttcctgggtctaacaggaagacagttcccaaccagacacaactcacttccttctatacaaacagtatacaaacttaagtgacttaaagaacgagagctttgacctactggttgagaagcattctgagtttgaacccaggactgactcccacaatctttcctaggccccccacattcacagatgacatgcatgcccacatgtatatacacagatacacacacagtgttgcattagggagtgtgagggggcatcacccgagaaacctggaccaggcccccctagcacacctaggtgataagactccctctttcctggggtcagtgaccacagctctgtgacggcacatgtgagataccactgagcactcacagttgggtctgaggtgggatgcaggaactcatccggaacctaccccagggcagcatgaagcccccttccttgacactctgggtaccagattcccagatctcgacatcctgtgtccacattcaacctcttaagctctctttgcacatgcgcctgcctctaaaccacttcccttcttccagatccaactcaacggtgtcccatcatttaaggcctcgctgaagctcttcttcctccaggcagcctgtacggttcattgcctttgcaatagcagaatgtgaaggcaaagtaggaaggcaggagaagccgagaggctgggacccgcttatgatagagctaaacaccattggctcagactctgcaaaggggagctacagagaggtcctgaaaagagagacacaccctagcttggtgtagctaatcaccaaaggttctctcttccacagtgagcagtggggtggtggttttggagaggaacaactgggggaggggaggacataagtcttaagagaatgaggtggtacaaacaggttgcatgctaaatacaagtatagccatgaaacttaggatcatagaggaagagactggtagataacccactatggagaatttgcattggccagtaaggaaaactccttggctaataactttgtgcagataccctaagcctcactgaagatcaagatataagatgacactctggtggatataagacagccagtttctatgcctggcgcctgtgaatagactgcctttcatggcaagagggactttgtggctagcctgagaagggtctattatgggttatccaggcagaagcaagagaaaggaaagacaggcattactgtgaagtgattccattggagccaatgtggctttgaagacataaggagccacaagccaaggggtgcaggcagcctctgggagccggaaaagactcaagagattagtgacccaccccagtggggttagtgcctagctgctcaaagggaccagtaactgctgcttcgccaaagagttgcgatttgctgctggagcagattctggttcctgcccattcattgtcccttaggcagttcttcatccatcagatgggaagtcatcctgcaccatgttcctccctgagaaaactggcaagcggaagccaagtgcctgtcctgttagccatgacctagatgttggccggggctagggcaaaggaacctgggaaagaacaggctgtagctaggtggctgtagatcaatcaaagttggagttttctatactaagaagggcaaatggcttctgggagggatccagctgtgttttcattcccaaccagggaccacccttgcttggccttgacctcattctgatccaacttccttctgtggcactttctgactgcctcacccagaagctccaggccaatatcctcatacctgtcctgcctcacttttactttccttcataagtgaggactccacacacacacacacacacacacacacacacacgcgcgcgcgcgcgcgcgactgtgaacaactctggaggtggctgataatctggtgtatcacgaagtgagaatatttgctgttcatatcctgtctggcctgtggtcttgattcttggatccctagctattgaaagtggcaaggttcactttcttggcaatttgaaataactatgttttattgacagtaaatcttgtgaccacactttggtatactcggtgtgcatgtttgtgtgtgtgtgtgtgtgtgtgtgtgtgtgtgtgtgtgtgtgtgtgtaagttcattattagcaaagaaccttgttggaacctccaacttaacctctggggttaggttggtatagcagctccctgggcatgaagctcttgtcttctgtcacctcagttttatctcacttgggcaacagccctggcacctcagcctagagcctgaaatagattccagctggtgtcctgacagtgtgagtggcctatctggcctgatggagcccagttcctggctccccctgcttcaaaacattcactccagatcctgatcatgtggttatagcactagatatcaaaggagttttcccactaccttcaggatcccagccacctggccttgaacctgttgatgtcacatgattaaccctaagatcttggtggctctagttccagtgagctctgattgcttccttactggattgtttcaatagatgagcctgtggaagctttcagaataggagctgactagcctgatatgttagccaattagctgttggaaaccaaattctcctcatggttgtcagttggcttctgaggtcccatggcctcagtagtgaatgacatgaacattttctgtggctaatctctagagcacacttttcccctccgtagcttgaaaggaaaccctgaagcactggaccactgttgtggtgatttatacaatgtgcccactagttgtctaaaaagtggctttttctgtcacttgaatcatgctcagaactaagtcaagtgggaaagagatgtgcttttcatgtctctgggtcacagggtcagcttaggttctcctaaagagtagccaataccttgctcacaccacatctgaatttgacatgatcgaaggctgagaaattcccaagtcatgagtttttgatgtccagcatccaccttggcaacaacacctgtcctacaatttggtaaagcaagatgcagagggtgccagtcctaaactcagagggcctgtgtggccctggctggttggtcccatatgcctttaatttcagcccttgggaggcagaggcaagtggagctctgagtttgaggccagcctgatccacagagtgagttacaggacatggataaacacacacacacacacatacacacacacacacacacacacacacacacacacacatacacacatacacacactcacacacacacactcacacactcacacacacactcacacacacacatacacacacattcacacatacacactcacacacacacacacacacacacacacatgcttgcaaagctgaaggaactctctagaaaatctcccatttccttgggagtgattggatcagtctggtggtcacagccaggttcagtgtgagttaccatgggctatgtcccaacctttattgctttgcccagaaacacaagatagggatttgcatgagggtgaatatgagtgatatttctcaaggccatgcagatctggggccagagagtgtctttgttaacaatctatcctttggaaagctcatcccagcatcctcagacacttcttacctctcaccgatccagcaccatctgtatccccctcagcagcatctttatccatttcctaatggtgttcttctgcaggctacaggagcagttctgacgggacctgctactacccttattccagattcacagcagaggcttggcaagcccaggctccctgagactgggtcacagggcagggttaggggcccaggtctctagcccccagaaaccccataagacagtgtcagaagcattggctctgtggaggcatcggtgtagtatgagtgtggggagatggggtgcggcatcctgtttgaatgtctctggctagtttttaagaagtcttagccagctttaactgcactccgtttgcccagcctgtggacagcctcagtaaatccttttcctctgttgtgtgtattttttttccctcatagaagaccgtgatttctcctccgaggctgctattctccaatacagaattcaagggcagaagagggccgccccagcatccattgtggcatctctccggcccggactagggatgacaggcccatggacatggatgtctccgaccttcagctgttcatatagcacacaggggactcgtgggggccgcttgtcacccaaacccactcaatggcaatactgacatcttccaggctgttttcaagacaggcgttcaggcagaaaaatgccagtatgctttctgtctgcagagtagtgggctatgccacaccaatatgaacagcgtgggccctgggacctgctctgagtccacttgcagccactgacacttgaggggattaaaaaaaaaagcccagccccaaaaccatcgtggggttggcttccatggctcttgaccaatgtggccaaagctagacacctcgggacacttggattattcataaatgcgacctaccccaaactccctgagtagcatctgaagtcttgtgaaggtcatggatcctgaccaaagcatcaagggcaccaagaaggctgatggaagtccccggaagcggctgaccaaaggagaggccattcagacgagtgtttcttccagtgctccatacccaggcagcggcactactgctccctcagagagtgccacccaggagctcctagccacgcagcctttctcaggcccctctcaggagaaaacgggccagcagcagaagcctgcccggaggccttccatcgaggcctcggtccacatctctcagcttccgcagcaccctctgacaccagcattcatgtccccgggcaagccagagcatctcctcgaggggtccacgtggcagctggttgaccccatgagacctggaccctcgggctcctttgtggcccccgggctgcatccgcagagccagctcctcccatcccatgcttctatccttcctcctgaggagctgcctggcatccctaaggtctttgtgcctcgtccctcacaggtctccctgaaacctgcagaagaggcacacaagaaagagaggaaaccgcagaagccaggcaagtatatatgtcaatactgcagccgaccctgcgccaagcccagtgtgctccagaaacacattcgctcacacacaggtgagaggccctacccctgcggcccctgcggcttctccttcaagaccaagagtaacctctacaagcacaggaagtcccatgcccaccgtatcaaagctggcctggcctcgggctccagcagtgagatgtacccccctgggctggagatggagaggatccccggggaagagtttgaggaacccaccgagggagaaagcacagactctgaggaggaaacgggtgccgcatcaggtccctccacagatgttctccccaaacccaagcaccccctgctctcaagtagtttgtacagctccgggagccacggttccagccaggaacgctgctccctctcccagtcaagcactggcccatcactagaggaccccgccccatttgcagaagcctcatcggaacatcccctgagccataaaccggaagacacgcacaccatcaagcagaagctggcactccgcctgagtgagaggaagaagctgatcgaagagcagacattcctgagcccagggagcaaaggcagcacagagtccgggtacttctcacgctctgagagcgctgagcagcaggtcagcccccccaacaccaacgcaaagtcctacgcagagatcatcttcggcaagtgtggacggattgggcagcggacctccatgctggcatccacctctacccagcccctactgcctctatcctcggaagacaagcccagcttggtacctttgtctgtgcccaggacacaagtgatcgaacatatcaccaagctcatcaccatcaatgaagccgtggtggacaccagtgagatcgacagtgtgaagcccaggaggagctctctaaccaggcgcagcagcgtggagtccccgaagtccagcctctaccgggactcactatcgtcccatggggagaagactaagcaggagcaatcactgctgagcctccagcacccacccagctccacgcaccctgtgcctctcctgagaagtcactcaatgccttctgccgcctgcaccatcagcacccaccaccacaccttccgtggtagctactcctttgatgaccacgtcgctgaccccgaggtccccagccgcaacactcccgtgtttacctcccacccacggatgctaaagcgccagccagccattgaattacctttggggggtgagtacagttccgaggagcctggaccgagcagcaaggaccccacctccaagccctccgatgaaccagaacccaaggaaagcgaccttaccaaaaagaccaagaaggggttcaaaacaaaaggcgcgaactatgaatgtaccatctgcggtgctcggtacaaaaagagagataattacgaagctcataagaagtactactgctctgagctccagatcacaaaagcccactctgtaggtgctcatgaagtggaaaagactcaggctgagcctgagccttggtcccagatgatgcattataaactgggggccaccttggaactcactccgctgagaaaaagacggaaagaaaagagccttggagatgaggaagagccacctgcctttggcagcccaggcccttcagaaacagctcataaccgtcccctggggtccaccaagtcaccagcagaagcaagcaaatcagcgccctctctagagggacccacgagcttccagcccaggactcccaagccaggagctgggtcagaaccagggaaggagaggagaacaatgtccaaagaaatttccgtcatccagcacaccagctcctttgagaagtctgacccaccggagcagcccagtggcctggaggaagacaagcccccggcccagttctcatccccaccacctgccccgcacggacgctccgctcactccctgcagccaaggttggtccggcagcccaacattcaggttccagagatcctcgtgacagaagaaccggacaggcctgacacagagcctgagccgccccccaaggagcctgagaagacagaagaattccagtggccccagcgcagccagacactggcacaactcccagcggagaagctgccacccaagaaaaagagactccgcctggctgagatggcgcagtcctcgggggagtccagctttgagtcctccgtgcctctgtctcgaagcccaagccaggagagcagcatttctctgagtggctccagccgctcggcttcattcgacagggaagaccatggaaaagctgaggcccctggacccttctcagacacacgctccaaaaccttgggctcccacatgctgactgtccccagccaccacccacatgcccgagagatgagacggtcagcctcagagcagagccccaatgtgccccattcctcacacatgactgagacccgaagcaaatcctttgactacggcagcttgtcccctacaggaccatccttagcagtgcctgctgctccgccacccccagccgccccgccagaaagaagaaaatgctttctggtacgtcaggcctccctgaacagacctccagaagccgagctggaggctgtgcccaagggaaaacaagagagcagtgaggagcccgcagccagcaagccttccacaaaaagctctgtgccccagatctctgtgggcactacgcaaggtgggccttcagggggcaaaagccagatgcaggacaggcccccactgggatccagcccaccctacacagaagctctgcaagtgttccaacctctcggcacccagctgccccctccagcctctctcttctccttgcaacagctcttgcctcaggagcaagaacaatcctctgagttcttccccacacaagcaatggccggcctcctctcctccccatactccatgcccccgctcccaccttccttgttccaagccccaccacttcctctacagcctactgtgctacaccccagccagctccatctcccccagctcctgcctcacgctgcagatatccccttccagcagcccccttcctttctccccatgccatgccctgccccttcaaccctctccggatatttcctccctctgcaatcccagtttgcactgcagctccctggtgaaatagaaagccacttgcccccagtcaaaaccagcctgccccctctggccacaggacctcctggcccctccagcagcacagaatacagcagtgacatccagctgcctcctgtgactccccaagccacctccccagctcccacatcagccccaccactggcccttcctgcctgtccagatgccatggtgtcactggttgttcctgtccgaatccagacccatatgccatcctatggaagtgccatgtacaccactttgtctcagatcttggtcacacagtctccgggtagcccagcaagcacggcccttaccaagtacgaggaaccctcctccaaaagtatgactgtttgtgaggctgatgtatatgaggctgagcctgggccatcgagcataagcaaggaacaaaacagaggttaccagacaccatatctgagagtacctgaaaggaaaggcacttcactgtcttctgagggtatcctgagcctggaggggtgctcatccacagccagtggaagcaagcgcgtcctttccccagctggcagtcttgaacttaccatggaaacccagcagcagaaaagggtaaaggaggaagaagcttccaaggcagatgaaaaactggagcttgtgagtacctgtagtgtcgtgctgacaagtacagaggataggaagaagacagagaaaccccatgtgggtggccagggccggagcaggagggaggcagaaacactgtccagcttgtcttcagatgtatccgacccaaaagaactttctcccctctctcattccacattgtcccatgggacagccccaggctcagaagctttgaaggaatatgcccaaccatctagcaaagctcaccgaagaggtctgcctccaatgagtgtaaagaaagaagatccaaaggaacagactgacctccctcccctggcaccccctagttctctgcctctgtcagatacttcccctaaaccagccaaattgcaagaaggtacggactcaaagaaggtactgcagttccccagcctccacacaaccactaatgtcagttggtgctatttaaactacattaagccaaatcacatccagcatgcagataggaggtcctctgtttacgctggttggtgcataagtttgtacaaccccaaccttccaggggtttccactaaagctgctttgtccctcctgcgatctaagcagaaggtgagcaaagagacatataccatggccacagctccgcatcctgaggcaggaaggctggttccatccaactcccgaaagccccgcatgacagaggtaagttctgccttgttctagccaccaagtaatgcaaaagcttatgttgagcttttaaagccacattgtcttcatgctaagtttgtagaattaaagccagcttgaggtgagaggcaggtttttctctctgggagtcttgacctcataagaaaacatgttcactgagcttctctgcccttgtgtccctaacatagttgcagtaacgctatcagcaaaatgctgctacttttccagaagtttctactataaaattgaaaagttcagtttcaggaagatatagagtgattctctaaagaacaaagttggggaaattggtggggatgctttggacaattttagaactttattccagcattttcccatgtggttctccatcatcttattagtttcaatctgctttttaaattttttctgtatctgctgggggggggtctctactatcctttaaaattgtctcatttccacatttgacacaattcactcctaaaagaatactttcctgtaagatggtgcatagaactgggctgcagtaaacctctccacgtgtaggagacaatatcacaatttgagatgtctgtgctatagattagcagtagggtttcaatgcaactcatatttattcttccattgcctctgacctgggctacttaaggagctatgcaataaagtttcccatatcattttaacagatttgaaactcagaaattccaatttgcataaaaaagacaacacttttacacaggcaagaccagcctaaagcttcaggccaggacctgtgctggcctaatgtgacaaaatatcccaacaaaagtaacctaagggaaagaatttattttgacttataacttcagaagcatacaatacatagtggccaggaagccatggaagaggcagaagaggcatttagaagttggctggttgctgggcatggtggcgcacacctttaatcccagcactcgagaggcagaggcaggccagcctggtctacaaagtgagttccaggacagccagggctatacagagaaaccctgtctcgaaaaaccgaaaaaaaaagaaaaaaaaaataaagaagttggctggttgtattgtctccacattcaggaagcagagaatgaataaggagcagagcccagctataaatccttaaggtcatcactatagacactctcttgaacaatcttcccaaacagcatcagtttatatggggacttttcacattcaaaccatgcctggaatttttggagtgagcagtggtcttttggttgccaagccctgtgctgggccctggaccctaagcacttctcacctcgccttgtaaggcgacatcacctcatccattgtacagatgagggaacctgggctcagaggctgaaggaggtcaaagacttggggcaaacatttggcaattccagaatttgaattaagcagacgtagctggatgaaaaagagtatttcttttcttttctttttttcttttctttcttcttttcttttttctttcctttccttttgtttgtctccattctctctctctctctctttcattgttagttgaggaatgaaacttttgagagataattacaaatttaatgatgtccacatgtaactgttacaaactggtgctttgaccaaatcccacacagacactggaacccagactacttttgtagacctgagagcagacctgtgtctgcagcttcccagatgcttatacaatctgctttcatcatgaggtgaaagtcatatcagaagtgactgggctcagctggatattcttcacaaactgctttccaaatttattctctgatgtctttgtcagtccacatcagacatctctgagcaggatttccacttctggtgttactgccataaactgtggctgctgccaagatgctggcatagttacactggaaacacacctgctgtgtgccagatactgtgctaaactttactcttgttttcataacaccctgggaaactagggtacagtaggtaaatagatcaaagttcagagaggctaagtaacttacacaaggccacacagtaaatggcaaagatcagattcagaactagagctcactccaaaatcctttgaaacaggtctgaactgtcctattccctgatgagtggtatcagaagtatgtaagacaagagaagtgttggtttctcatctctaaatttaacagtcatttttttcatcctgctgctttcataaaatgagctgaaacctacagacatttccttagagtttaaatgttcctacccaaagtgtacaaatatcacacattaatataactgcatggtctctaagctgaggcttttctacaacccccattcccttccttacatgtctccagtaatgggaggctcacccccctgccagccccagcaccacccaagccatacttggctacagtttaagctcttctgcacactctactgacagttgtcactttgtagctggtgtcttcccttagccattacataaatgtcatttatctaagcactaggaaacatggcttagctgtcatctttagtatggtccacaacacattatgtttggtcatctgcatttaaatcctgaagagacccatgcttgcataaccatccatcttgcacaatccatcttgcagtcatttcttttcttatactttttcttccattttctctcactctaatagccatagccctgcaatgggagcaaggactgaactgcccaggtttgaggcccactatttcacatattcagctgtgtgaccatgggccattcacctaacttccctgtaccttggtttcttcatctgaaaatgaggagtgatgctaacttagctcaaggctgtgagggtgggcaacagtgttgaccagtgaagctatatatatgccctagctaacatgacccacattactattcaatgctaccacggatcctaggcccccaccccactcaatttaggcactgtttcctggaattgtgttgccacccaatcctacctcctctggcctccccagaatggcatcatatagcaatggagactctgtgtgcctgcctgtgttggaccccttggcaactctgtggattgcaggccatggtggaaatgtggagtgtgccctagaaatctaactgcttggcttccaccagcacagctgtctagacctgaacttagtttccatttcccctcccattgggaagggacctcagtgacctctatggggtcactgagtcacagaaatcagtttctgaatggatctttaggatgatctaagccaggtctgaagaggtggctctttagtcaagagtggttactcttcttacagagtttagatccccagcacccacgtgaagtggctcacaatcacctgtgagtccagctccaggggatctgatgtcctgttcttttctgtgcacatgtgtacatacacacacacacacacacacacacacacacacacacacacacacacaccacaattaaaaataaaaaaaaaaatttaatggcctaaggctttcttagtttcaaaccccagaaggtgtagtagtctatctaagggtatcccagcctccagtgatctatttggcattggaactcacttttcctggttcccaaggtgccccttatctcagctctatgggtgcgagcatcctatgtaaagatgtacatcaccccccacccccgcctcagatttagagaatatattctcaggaccctggaaaacactggaaattcacaatcagggttcacccttcccacagatccagttctcactgcagcccactgttctacagagagtggataccccagtggcctttggtgttggctcaggagggctagtgcaggaagcaggagacctgtgcattgctggagccacgccctttacctagtagattgctttggctttccaatctgaccatgagaacaccacggttatacatgtatacagagccaaggcttcgcctatttcttcagcattatttgtcttttttgatccctattttaagtactggagtgaccaaggtgaatgagacatatccccaaagaccccatagcatagaacacaaagacctacctgtgcgtctcaggggaaaatgatcttgagaggggttcaaaacacagcttagaggagactttgactcttgtggccagtccttgagtctgtagagggtgttgagtgaaaaacagaggccgtgtgggtgcacatgcctttgcccctgacccagtatgcaaggctaaccaatcttggttctgtctttcccacggagttcaggtgcacctcccgtcgctggtttccccagagagccagaaagacccagctagagtggaaaaggaagaaaagcaagggaaggcggaggaaggtactcccacttccaagagaggcgagccggcgagggtcaagatcttcgaaggagggtaagtttcatgcttttatttgcagtctgcttcctgtgtggagaccttctaccacctgcgcgcagaagtggccagtgactcctggctgtgggctgcccaaaggtacctatagtcctcacaggccctccctatactttgggactccaaggccatctgttttgcaaatgctaccaggaatccttggtgatgatctgaaggagccaaggtctttctccagccctgtgtccacagatcttgtccaggttctcacccagcattgaagtgatgtagagtcctcagctccacatcagtctacactattgtttcctttagagtttattgcctctgtcctgccaggccaccctggtcacatctcacttcccgtggtgctgaagagtgattgaatgccctctacactgtctctgccttgcccactggcaggtccactctaggacacaccccatgtaccccaggctctagaggggcacctggattcagatgtactttgtggaaggtctttgtgcactttttgttctgtgtggccacgtgtttgtgagcaggtcccatggtgtctgtcttggggtcctatgtctgtgtccctgttgtgatcagggtggtaccgattctctacagttctgatgaaagcaatctccataagcctctgataacatgggacatcagtggggactcttgctctccagcatctgtaagtgactacctcatgggaacacacagtgacaactgtgggagtctctggaaagttggcattttggagtggctagaagggctcgtggggacaggcagtggttttgacaggtacagggtcagaggacggtgaatgtccctgaagcacatccacaatttaaaaaaaaaaaaaaaaaaaaaaaaaagacctctttgacaaaaacaggaccataggttctgcttcagagcctgaccctctttccacttgggtacagtggcttcccatgcctacatttggctagagcgccctcatgtggctatgtgccctcatgccacttggttccaagctccaggcttggcagctttgccccttcatcctcctcctgggtgaaggggatagcaacaggcttgtaccaacgccctaagccccataaggccaaggaaggatatggttcccacagacctatcacatggacaccgaccagcccctctcctgtgcccagatctttgtccccatctgaagcacctcactctgctcttggctgtggggagtgtcatccttgtgcttctagctggtcacatggtatcgataatcaggttctttccatcctcagctcagctgcccctcaccctgactctaagatctactgtgcttcctaccctcgcttctggtaaacctcttctttcatgggctcggtgctacccactaggaatatttgctgatatgaaaagggggagcattttgtgttgatacctatctgaggacacctccacagcgtctcatgaatgggaccaggactcaccaagtgcttgtctcatctgtcaccaagggtgcacctattccaggatcctgaacacatgcttaaggccagtctacactaaccgtttcttcttagcctcattgccttcttctttctctctctttaacacttacaatatcttgtttcacagcagtacatactggtaaagggtctgtaatgaggcctgctcagagtccagcaagagcccagagagggaggcagaactgtctgctgtagagagaatatcttgtgtaatgtatggatgcatcacctgtcaatgaaaaagcccaagacttaggcaggaaatagaaggtcggatatctgggaggcgggagagattctgggatagagacaggtgtgggagatcggcctgggaagatatgaggagacagacatggtacctgagcacagtaaccagctgcatgatagaatgtagggtaaaataaatgaacaggtatcttaggatatgaattctagtcagagtagagcctagctatgtggccaaggtatttgtaaatatattttgagtctgagtcttattttgggagcatggggctgggaggaaggattggtacgtaacttctatagtttgccagctgctaatgcaccctccttggccctggagtctcgtccactgactacagagttgtgtactctaagaccgtgggagtaaggatggacaatcccagtcatctctgatcctgagagaacttaaaacattcagtcagtcgcgctggtgggactctggtctgcttcgtatgcatctgctagtgggtaatttctccatggcatctgtgcaggtacaaacagggcctgttcacatgttaatctaataagccaagtatagaaagatgggtgttttgtgtgtctagcttcctcaagtctttggatcaccagccacattccttgactctcagtctagcagttgaccaattagtcaatccatcatggaggatagacttaatctgtgccttgtaggagctttaggctagacgttatagtgacctagttagtatcaaactgttattcagtacttaagctgcttgtggaccaaagcaaggtagcaatacaaaaccctgttctgaggtagggaccatcggggccgagatacccacagcacccacagggggcttcccagagctgtaggaccaggctgggtggtgtggacagggtggggtgacagacagctggagggccagtctgggtgaggtggacagggtggtttgacagctggtatataaagtaggctggtcagagctctccaggtgaccactgagactcttggattcttgccaaggttgcctgtcttgctgacatcatcctactctttggcttcagacttctcattactcttgctgcaatgtctgggatcagagctgggccctcactctgagctccagaccttttctcggacacctatggcatctttgcctaggacacttacaaactcggtacagctaagcaaggcccgcacttcccaatcatagtcttagttacttttctactgctgtgaagagacagtgactaaggcaatttataaaagaaagcatttaattggagatttgtttacagtttcggagcgtgagtccatgactatcatggcagggagcatggcagcaggcaggcaggcatggtgctggagcagtagccgagagctcacatcttatttagaggcagtaggcagagagagagagagagagagagagagagaacattatgtctgcagtgagctccccaatgacaaaccttcaaaaaggccacacctcttaattcttcctaaacgcccccccccccgccactaggaaccaagcattcaaagatggggtcattctcattcaaaccaccacacatggtatctcctccaacctttgaacttccgatgatgaagccttcacactctaacctcaacatcacctcagatgccttcttctggattccatacggtccctagattctggtgtctgtatgtgaagtagtcaagggctcagaatggcttctctctccctttatcccctgcatcctaccctccagtgttagggccactgggcatctttccacatggttgttcctgcagagcccactgtggctcttacctgcagtgttaactcagcctctctctaacttgcccaggttccttcactttctgctgcctatggattctaccctttgtctgatccacctgatcttcagaaatgagtgctagccctgcctggtgaacctctgaggtccctgccctggcacaccatagatggtttccataataccatatcaagtctcttcttgacttggtcctggagcaatgcttttgtccacagtgttggcccctgtggactaccctaatgtcccctctccgtgtcccctgccacttttacacctgaacaaaacctgagttttccaggcagtgtctgggagtacctaggagcaccgtgcctgctggcttacacccagctctctgaatttgccttactgttgaggaagggctcattccgtgaagcagtgtttgtgcacatacggttatattgttccttgagtggaacgactacattgttctaactcaagagactttgcccaagggaagctgggaactcagccttgtggctggcatagaggaagctcctggggtggataggaagtacctggctgacggcagtggctgcacataccctatccaggttcgatgtgtgtgctgaggtctgaggaagtgacggaagtgaagctagtgaagtttagggagcccagctccgtttaggggaggccctcagagagctggccgtgagcaggaagagccagcctcagcttggaactggaactcagggaagaaataccaaagtgtcactgtgagaaagctccctccccactccctaaggatagaagagagtggctcacagactcaccccttggccaataggtctgtgtcagaaggacccagatgctatgctgaggaaaccatttgttcccaggaagagccctggccacatccctctcagcctcacttcatccaaataagtatatccaggtttgtttccactccaaatcactccttggatagctaggttttaatagttgtttaaatacacacacacacacacacacacacacacacacacacacacgctgatctgtaagttccagggatccaatgcctatcttctgacctctccaggcatcaggcatgcatatgggacacatatttacatgaacttatatgtatacacaaaataaaaataatcaagctggggctggagagatagctcagcagtttagagcacctactgctcttacagaagacctgggttcaattctcagcactcacatggtggctcacaatcttctaccatcaaaatctccagttccaggatatctgataccctcttctgggctctatgggcaccaggcatacagatggtacacatgtaggcaaaacactcatacacataaaataaaaattctaaaaataaatgtaaagggaaaaaaaaaaaaaccctcggagcggttgcctctgactcaggttctctccccttcccttcctacccagttccactccaggtggcctggggactctcctaccttggcagctcttttgtccttgtaaaggtcaacagtgacctgcactttgcagaggtcaagggtcactcacttccagtcttttctgactttcagcagtggacaccgctgacccttgtcttctctttgctgtggactggggagtgaggtagctggcctttcacagaggacaggccagctttgtcctatttttcttgatgtcttcaaatctgatcattctgtctccactggggaatgtgacatgaattttagaggaacccagtggttaccaaggcaatgaagaccatgggatactgagagtccaaacagcctttgtgttaggccattgctaccttagctattatgagataatgttaagtttgcagctgggaagcaatggcaagggcagtggggtggggaccctgggactcctgacaagagaacaggaaggcagaaatgaagcgttgccacctcgagtgtggccccaatcactgctgggcacatgcagaacagagataaacacaagacccaagttgagagagtggatggccgaccctggaggcactgtggagcatgtgaatctgagagccagtttctccgggagacatggtcttgcgcgcgctcaactggccaggaagaacgacgctgctacaggatccttctgcacacatttattcagtcctgtttcttctttctccatatatctcccttgtttatatatctcccttgtttttatatctcccctgtttttatatctcccttgtttttatatctcccttgtttttatatctcccttgtttatatctcccttgtttatatctcccttgtttatatctcccctgtttatatctcccttgtttttatatctcccctgtttttatatctcccttgtttttatatctcccttgtttttatatctccctccaaccctgggcctctcactcttttatactctctctcatccacacaccgcaggccacgccccctcgccagtcacgaggcttcagctaatcagggcagcaggggcaaatctccaccaaattggattcacctgtatcctggtacacctgcgcagcactcaagatgtttgtgtcttatatgaggaagtcaggtgcaagtcatatgacttagctacagtccctggcgcctttgggactgccgccacacccgctcctaacatctcccccttttttcttttctggcaaaaagaatgtctgtagatagccctccgcagccatgccccttacccgtccttgggagacaaacagcaatggtttgatccctgtcttaggttggtgacatgcccagggagacttatcactgactacctatcatgccaagccacacttggggagattgtgttttgcttgcggcaggtgcatcaaaaggccaggatgttgattaatctatggccagatcttaattgctgcaagcaagcctcatgggtgaaggtagaggtctgatccccagtgtgcaagcataggggccctacacaaaaccatcccttgggctcatcacccagagaggtcttggccagctcccgtgtcgtttttcctgtgggaagggaactaggacactgaaccttcatttaatcagacatgccttccacaggatgccaacagcaagctatcctctgtgcagtgcttagcctcgcaccccacggcataacgcagcataatttcttttagagtggcaaaccaaatctgaggagattgtcccgcctccactgcagcaaaagcctatgctaccatggcgaaagtgcgggccgcacactctgcacctaacacatgtgccaaacacaaaacacacacacactataacaagcatacatcccagggctctcatccccgctcatcttccctgaagcaagggatagatggccagcggggctatctctttaaggggaattcagggatcaaaaagcgtggaaaaatttgaatgtcatgtcgagctggtatcgacttctggaacaccgaaaggatctcccatctcggctccatcctttgtgcttgtgggaatatccaccacatccacaggggcaactggatcaggagcctcattcttgcagcgtctcaccaatctctccggcacccaaagaggttccgtctggtcctgtggaaacacacaaacagaccctctcgcccacgtcaacacctgatcctgtcgatcccaggggggatggacacaatacctcgtggtgatgagaccataacctcaatcacctgtgtgtccatctggggagtcaatacgagagtcaagttttcactaacttcccctctgttaggcaatgatttccacacccttatagcaatctgattcacctgcccaaacacctgcactggatatcctgactgttgttgtgcaaatctaccttgatcaagcagcatatctctatcccatgcaaattcagcttgatcagtgaaaataggacatcccagcaaggagaatctatcctctttccagacctccggacagaaggtctgcccatagatggctgacgaggaggcatagggagggggagcaaaagctaattcgccttcctcctctgcctcaactcttttattttgtcctttctgttcacctgataacactgtgtctcctttctttttcctttttctttttaagcccttttcctcttctgacatactttcttgttgctctgtaaggattttctgacctgtcttgactgcctctacacacagtttcaaacagtaacagagtccatatatcagaacaaacaagaccaaaactatcagacctacccacaaagggtcaatgggagaaaaaagcataactactcagcgaggatctattgatcactacactgaggttatcatagttccttaacttgtccccaaacagggaacctaacttgtcccaaagctgggaaccttttgttaccttgtgcctgcttcctggcaactttatgctcgcctctattttatccgaggtccttcccaaactcctgggttactttgtgcctacttcctggcaactttatgctcacctctattttatccgaggtccttcccaaactcctggggtcgcaagtttcactcaccgtgaacttaccctgccggcaaccactgactgctgaaagttctgaactcggtgggggagtcggttccccgtacgggccaccaattgtcgcgcccgctctcgaccagcaagaacgatgcgaccaccagtccttctaacagcagtttattcagtcttcatctctcttctttctcttcatcagtaccgttccccagctgaagagttctgaatccacgccggatccttctcaacagtctgtttcacgggaacctttattaaccccttcttccccgttatgcagttctgaatcctccctgtagcagggggtcttcgcttgtgcctgaagatgtttcttttcccgggtttcggcaccacttgttgcgcgcgctcaactggccaggaagaacgacgctgctacaggatccttctgcacacatttattcagtcctgtttcttctttctccatatatctcccttgtttatatatctcccttgtttttatatctcccctgtttatatctcccttgtttttatatctcccttgtttttatatctcccttgtttatatctcccttgtttatatctcccttgtttatatctcccctgtttatatctcccttgtttttatatctcccctgtttttatatctcccttgtttttatatctcccttgtttttatatctccctccaaccctgggcctctcactcttttatactctctctcatccacacaccgcaggccacgccccctcgccagtcacgaggcttcagctaatcagggcagcaggggcaaatctccaccaaattggattcacctgtatcctggtacacctgcgcagcactcaagatgtttgtgtcttatatgaggaagtcaggtgcaagtcatatgacttagctacagtccctggcgcctttgggactgccgccacacccgctcctaacaacatgggcacttggttcttgagctgggcaggcctgagctggaaatacacacatggaacttgtcagtgtgcagctgcactttgcggctctgactagatgggtcacctggggagaaggaaaagagagaaagggaaaggacagctagaacgggggctgggttctgcattggagggagagtcaaggatgctgagaggcaggatacccagagccaagtggagtccaagaagccaagaactgagagctcagctaggcatcaccctgcctggaggcccagggaggtggggatgggggactgtctgctgcacagccctgtggggagtgtagtggctgtgatgggagctgtttcccaggcaatggatttcctgtggtccaggctgagatgaggaatggaggcagggtattaaagccctgccctaaaaggatgaataggggagagaccaccaagatggaggaggaatggaagccgaaggggctgggggaatggaggggggaatgagcaggaccttgtttatttgaacccgtgtgtgtgtgtgtgtgtgtgtgtgtgtgtgtgcgtgtgtgtgtttgtgtgcgtgtgtgtgtgtgtgtgtggctgtgtgtgtgtacatgtatgtgtatgtgtgtggctgtgtgtgtgtgtgtggctgtgtgtgtgtgtgtgttggggagaggggagagtgaagaaacagctcaaggaaggataggagaagatatttctctgaggatgacaggcagaggggaggatggtcctctgtcctttcttccctgatttaacttaggttggttctacactgtccctcctggggacagccattatcttgggttggtcaagccttcttcatccactcatttcttgacaactcccagaattgtattgccagttttctctcttattctgtgaataaaatcataggattggtatgctgataaaaaaaaagggggggtgggcgagagggagggagggaggaaggaacaggagagtaaagttctcccaccatgatgttcatgttcttcagcacttcactgggcttggaaccgcctaggatatacacttctgggtgtgttggtgagggtatcccaggggtttttaactaaggagggaagatcccccataaacatggggtggtaccaacccatagaccaggagctctgactgggaaggagtgggggcaggggtgggggataccagtgttcatttctctctgctctgactgcacaggcatgagcaacccctctgtggtggactgtttcccttctctttcctctttacattgcttcttgtcaggtacttgctcatgggaacagcaaaaatcactaatatatccctcatctttagtgaatgacagccagtgggctgcttctcaaaaacaataattagccatgccacttccttccaaagaactctttgatgactgccatggcttcacctctaccctaggtctgtgtggagacacattctaacctaccaaggtgcagaggggtgcatgggagagccccactgcttacgggctttggaagcagtcagagtccggtgtggacaaacctatcaaagggaggggaaactcagcttgttctgtaactgcgtaagccacagacaacaggaacacatcaaccaggaaaatgtggctctggagacagatggaaggtctggcaagatgggtacctgaatcttcttagctctgacacccttacctttcctatctttgggcctcttcagaaacaagagcaggaactctcggcctgtggagctggagactcatggggtggtattctttctgcaagagtcactttcccagactgtaattgaaagaggagggataagtcttggacttggagtgtggggacctgcctcacacagtgagtttgtactctgctgttgttggctctgtgggcctcagcaatgctgggctctgtgtgagcctgtgtttctcattgtacagtgacgatggcccggagggttggatgagctgtgtgctagtcctgatggggcatatggggcctctcctgttgccaatgagctgcctgagctgtgagaatcacagagctccatgctagagagaaggctcgaagggagcctgcaggagaagacatatgaaccccagcctccctgtggaagagctaattctctgaaggtgcaagaaccacacaagcccttcaatagcgtgctccttcctgaccaagagcctctggagggtgccacaccctgaaatgaggtagcttgaaaaaggagcaccaagaatggggtctagtttgcttgaaaacgcacaactggggagtcaaagagatatcaagcctcttggtgatgggatgacagaccccctaaatcctcagaaaactcacatctccctagcctctggatctacctactgctatgtcttccatgctgtgtgcacccagggctcacagagaaaagtctggttgttcatccctacttacctgcagagtgttgttcttgattgaaagcccctgagccccatggccaactgcccctctgccgggtctggcccctgagccccgtctgcagtgataaatctatcttttcattctgtggctttgtagataccttgaggccaagatcagagtctggtggcctttccccagccccaggctcaggccaggactgttggcgtaccaccgaaagctaatgtaggcgtagagagtagaatcctctgctgaccggtaggctctgtacctgtgtagaagtcccagcccagcaggtgtgggactggatggcacattaaacaccccccacctggcaaagcatcaatacctgttgtcattcttcaggatcctgatcagagaggaacctgaggtgtatccagagctgaggcaaacaccctgctggcctcacagctcagccgccccctccccaaggcccatcatttaaagcttcatcaaggtctgtgttggcaactgagtatttctaacagacacacagcccagcaggcagtgccacctggcacctgctcctccccgacagacatcattccttttttttttgagcttccctggggttaaccagttcactgtggctgcatctccccaagcatgctgaccgctgagcactggccctgaacttcacaggcaaaggcttctctcagttcccgagatacccagtgtgaacattcccggtcatatcttctcgctcggcgtgattgtacccacgttgttaccagagttgtcaaaagatcataatacagtcaggaagttgaaaagcctttctacatccaaagttggaggagaagcaagagttttacagttaaacctgaacggtgtgtggagccatcaacaggacaagtacaaagtaggctttgtagcatctctgcctcagagggtaacctagaggtcacggcatccatccccttattcaagataatggcatagctcagtatcgagaaaagtcatgaacttgaaaggttagatgtgcctacaagtacttaaccactctaggttgggtctctgtctccttgagttatttgacttatacagtttcattttgtttgtttttagggcataataacacaggctttaagatcctgactgtgtaggcaagtgacctgggttcaagttctgaatccattaactgacagtgtgaacttgggcaggtactcggtgctctataactgtaccctcagtgagagcaggatgggtggggcccatagctcatccactgtcatgtgatctgaatgaggtaacatgtgagcttttcaaaatagcagttggcacccagtaaaagctatatgagttcactgatatttttagttgttgtttttcccccttctggatttgtggtttttctcaggaaacctgcaaaatacagcaatttcatgccacctttagctggatggcagcattctctgacccttcagagaggctgtgtgccctgccttccatttcttatagtcctccatacacacatcccccataggtaccccctctacctcttcagcatttgagcacagcccaccctccatttggtcttaggaacaaatgtaggctatgtaagaaaatgcacatccacttgacaatgctttgatggtctggacaagcttatctgcctgcagccgttaggctcatagtcacaattcctccctacagggctacctggcttgtgcaatgcggagcatgggtttgtggtaggaagctcaatgccttacagtggcttatgatacctgcatctttctcatatgcagagcctaaggtcacctcatcctctcagtcatctcacccccactgtacccctcttctggaacctgcagaaggatagtcacctcctctggtgtaatctgtgccaaacacctgtcaacttagcaaaagtttcaggtcttattaacaattccagagagtctagagctacaaaccaaggggtcaaacgcactgactgtccagacaagaagttcagtgtcatcagccgaatgcaggatgggaactcaaatcagtctaagattcagtgtgtcatatgccatagcaccaaagtcagagctggctccctgtcagacatctccattcacagctgcctaggagctctgagcatgatgctagcctcattgccactttgactagaggactgaagtcctgactagggctggcctgcctgagaggctttctttgctttggagtctccaggctcagagctacagtggaattcaaaaatagttgcccaaggcatgcttggcagctgtgtgtataaacacatgcaagcgcgctcgggcacacacacacacacacacacacacacacacacaccacccaaacccagaccaaaagacaaagagctacttcctatccccacaggacgtgggagctccagaactggggctgctggggctgctggggctgctggggctgctggggctgctggggctgctggggctgctctgctgaacccctactgcctggctctaaatctcagtcagggtacctggtcttaagattccctgcagctaatacattccaaattcctagagttgtctttttctttaatggaaacaccagactagctgacactctggctagtagggactgcaggggacaggtggacagcagggttttgagaagatacatgggtccccggagtcatgggtcatctacaccaagcctgacaacacagggaagcctgtgtgtcaggcctgtgagagaaagcatccagcagtgaagaggtggccagctccaagcaaggctacccttgcatctctgctttccggccctgactctctgcagctgccaacacctggatgtctcatttcaggctacagtttcagggaaggctgagtggacaacaattctgttcttccctgtctgcagcacagtagatcccaggtttgggttttactgctgtggacagacaccatgaccaaagcaactcttataaaggacaacatttaattggggctgacttacagatttagaggttcagtccattatcatcaaggtcagaacatggcagccctcaggcaggcatggtgtaggaagagctgaaagttcaatatcttgttctgaaggcaaacaggagaagactggcttccaggcagctagaatgagggtcttaaagtccacactcactgtgacacacttcctccaacaaagccatacttcctgatagtgccactccctgggtcaagcatattcaaaccaccacacgaggtcactgggaaactacattgagcaccaagagtgggcagcagtctgcacggcagccaggtgctcagaagatcagcactgggctgtcttgacatgtcagttaagctctttgggccttggcttccctttctgtacagaggcaaaaaggactgggggttggacagaaaggtggataatgtttagtctataaagtgctttgcatccccaaagattgaagatggactggtcctatggaggggcgacggtagcaagttctagtaaaatccagagatgagactcaagaccttctggccgccactctgtgcttacattcattctcattagaaagttatgttacatgcctataacatagtcagttaagactggaagtttgaggcttgcttgggctatatagtaagtctacataaggcagaaaacagaaagagaaactgtttgttgagaagcaccagccagagcaggtacagggggacagggtatctgggtttagagaaacaaaattgaatgaaacaaaagtgtgtcgtgttgaagctcattactttgtatgctaacttagaatttaattttaaaaactggaaggagcttctcttctgggctggagagatggctcagaagttaagagcactgtctgctctttcagaggtcctgagttcaattcccagcaactacatgctggctcacaaccatctgtaatgagatctggtgccctcttctggcctgcaggcatacatgcaggtagaatgctgtatacataataaataaataaataaataaataaataaatcttttttaaaatctggaaggaaagaaggaaggaggaaggaagggaggaagggcatgttcattcatgctgtgcatattggaggcaccctcagcattaggtgaaacttgtgtgtaagggcacatggggtgggcaaatcagtgcagagcctgatgccagcgtacttgaataaaagccctggctactgttctgacctgtgagcatttagtgagctcttgatgggcaccaggtacaatgctagactctggggaggctccagtgagcatggttgactggtaggaggggcctgatttaaacaaggtgggtgctggcctcaggcagaggaaggactagccctcactgacagaaaggtgttccataaagttacggtctcagccttcaaagagttgaagcaagtcatagggttgagccctgtgttcaactggagctgtctcttcaaaatccctgagccttcagtggccatcttccggccctccatgacctgtgactctgctgccctgcccctttctaagccatctctgctgggctttcaaagctcagccctgtctttggtccttgatgctctgcccttgctgtgtgtggcaggtcaaacgggcattttttttccttcacacctctcccctggatctgccacagcatccctgagcagccttccattctcttgcccagccaccctactcttcacaaacctataaaattctgcatccataggtccccgctgtgtgctagatgtttctgcgtatctttcttatctatgtcttacacacagttgttaaaatgagtgccctcattgcctcattcccagcctgtgaatggtctcgagaacaaggccagtggaaacttaagatgtctgtttctccctcatcctgacccctcctctatacagacagctgccgaggatgtagagttactctcagaatacttcgtgtttcctgccctagtcttccccaatctaaaccgttcccaagaggcaagtggatagttgcctcttgttgagattttgtttatctgcaatgcaatcttccatcaggtctggagtctttaaactgcccaatgaccgatcgtatggtccacatgacctgtgtggtctcctttcttctccttgccaacttcccataccttttagcacacctcttcctttgtccttgctgaaaatcctcctcctgctggccaccctcccgaccctgcctagccacgtgctggccagtagatggcgcccagcttctatagtacatgaccaggtggcataggatgccaacctctctgcaaaaaccctctctgtccttactgtgatgtggaggaagaagtgaggagatcagcgagatggactgccttagacccacttccggttgccatgataaagtccatgtaggtggaggccagaacagctgagggactgtgtgaggagcagcagtgtagcacggaagagtggtcagggagtgagtctcatggacccatcaaacagaacctcccgcagccaactggaggttagtggcaggtgacagagagcctatagcataaaccaaccttattactgagaaagagtgccggcctcaacttgaagactgcaccccaagggcacaaggaaaacgtgaggatgaaggcaaacttcttcctgtgtttgtacatagggtattctgggagtgcaccccccattgtgtgcaggtctttcttttgaacacaagatgtagattagatagatagatagatagatagatagatagatagatagatagatagataggcaggcttggagtgtaactgtagggtgagagtgtgatagtggaggtgtgtgcttgaagaatgtgtgattgtaggtatgagagtgtgaggctgacagggtgggcagtgtgtgactgttggtgtgagggtgtgactgagagcaagcagtttgtgactgtgtgtgaatgtgagggtggctatgggtgtttggggtgtatggttgttggtgtgagggtgtgaattgtgatctgtggtaagaggtgtatgatgctgactgtaacggcatgaaggtgactatgaatgtttggggtgtagggttggcggatgttagagtgactatggatgtttggggtgtagggttggcagatgttagggtgactatgggtgttggggtgtgtacgactgtgggcacgaggggtgtatgattgcttgtgtgagttgtgagtgtataagtctgggttgtgaggagtgtgtacttgtgggtgtgtaggcatgaggcatgagataaaccccctactgcgacctggagctcctatctgagagcccctcttcgagcccatcctggtcacacctctcagtctgagcagactcagtgctgttgtctctctgccatcgacccacctgcccctccagtgagcacagacaacaagcagtctttgctgaggcaatggggagacacatccccatctgtcttgtggtggtccatggcttctgaggtagacagctaccagaactgcttctcctgctgttcttaacgcctccagtgtgggataccaaagagagctcagtgcccctggtgcgttctgaacccaggaaggcaatggtggcccctgttcctccctcttacacgtgtccgggtggcttcctggtcggccaccttcttttgttgacccttgggggagatgactacatcaagactttgtggacccaccagccgttaaataatgacccagagactgatttatttgtattatagcttaggcctttagcttggactacctcacagctagttcatctaacttaatcctataatcctagcccaccccaccctagttctttgcctcaccctcagtcccggtacactaccgaccccctccgtgccctgctgtcaaatccccactactcatttcatctcccagacaccctttctcggtgtgaaagttctgcctagctattggccacctgatctttattaagccaatcaacaggtgagggagggagagtgtttgcagaattctgaggcaggtggatgatctgtaagaataacagtacccaaatccatccagtactcacctctgagggcacagcaaccaacaactgaatatacagagacatccttcacacagtgcacccctacagacaacatggcgtgggaaggtgcgggttctggtccagccctttctgactgggtgctcttcggtgagtgtctcaccctctctgaacctgtttagctcttccttgtgaggcgatggtgacttacttcaagtgaagggcttgatgaatggcagcagctatcactttgtaagtttttctctctcggtggctctggtggcctccagtggctattctctgtggcagagccatggcagcagctggctgtgggaaggcagccagcagccagcggggaatttgccactttcgtgtcttctcctttcctgccgtgaaaaatcatctcctgtggctctgtggaaagggaagacgccatccctcctatctgacactgggctgcaggagtctttggtggctcctcagggcaactgagtccctttcagctctgtagctataacacatcgcttcctccagtgtccacacctggctggatgcagctagtcttctgaggtgggactctgcctacctcctcgcctttttttttttttttcctttacatgacacctgttgctcacaggtacaaatcaaacgaagagtatatatatgtgcgaggccgcggccgagggagatatgtttgtgaggaatgtggaattcgctgcaagaagcccagcatgctgaagaaacacatccgcacccacactgacgtccggccctatgtgtgcaagcactgtcactttgcttttaaaaccaaaggtaagagacagttagctggggcaccacctgcccatggcagggatccccccctgggggagccccagcacagagccctctgcctaaggactggagtacccccacatcctgaacccccacatcctgaactcccacccacttggtagccatggcagagcagtgtggctccagactgatccgtgatgcccacagctgccacagtcacacaaactcctgcccatattccgcagcctctaagtccacactttgtggttctctgtagacctcatcaccccttcctctgcatgtcttcatggctctgatgacctctggcatgcacacttgtcacagtcactcttgcactaggggatccattccacttggagccacatgacacacttgcatgttcacttttccctattcctcctcaccacacccagagttctctgatccacccctcttctctgcagcgttcagcatagggtccggcttcaacctacctccacccccatcctgagagtctatcacttcagcttccagccttaccccacatcccacagagttaggacagggtctggcagtcatttgtgagaggaaggactggctgttgagagcgtgcatctcagagagcaatggcaggagatggtggcctgggcctgctatagtcttgaggccctggtgggatggacatgcaaggttcttgaatggggcacttcccttgttggggggtcctatagcttgcttgcagagaaagatggtggaccttgcaaggaagctggggtgagcaccccagtgggttttgcctctcacactttgcctgtgtttggatgtgaggatcctggcttctcttctgagttaactagaggaggagtcaccgggggctgcagagacagaactcaaggcagacgttggctttcctcttgtccttccttctgaatctcagtgggcagggcaacagctaaggacagggggagccgagccctcaaggctcctgttgccttctgctcttgccactgggtcaggagtggcttgtcactttcccaggcccagtggcctcttccggcatgccccactactcatttcttcttggtagcagaccctgctctcctctgtcttctcaccatcatcttcgagctgagcacagtttcccaccatgatctggaactggatggagacacccacccttccacttccttttcctggtcctcttccttagcatctcagaagcagggtctcaaagggtgctgagaaggcagttaggtgggatcctgacccaaagcagcccagcttagtgcacatgggtcctctgtcccacgcccccatctgcggcctctccttttctgggctttttgtggaagagaggtgggaatcgctgactgataacgcaaacaagaaagcccttaactctgaaagtggagaacttctcgattgggccagaagagatccccaaagcccatcagcctctgtcccaaggacacaatgccctcatcttcctccctccactggctgaggcaacctctggatgaccacagtgctcttccaggtatactgagcgatagcatcgttctgccctcagcatgaagagccctgaggaagcctccactctgggctaccacagcgcacatgcacctggccccagtcccctgagaaacgcccacttacaccttggcctcactcattctggaaggtctgtttgaggtggcagtttatcccctgggaactttccctggatctctgtctctgagccaccccagagatccagacagtcctgagagtacatcctggggactgtggccttcacatttccagaggtacagggagtgccttcaggaggctgggttttgttcttggccagtgatcaggagcaagctaaggtcttcctccccgggcctctgagccctctgagcacatggaagtaagtctgaaacatggactctcgtacttccggcccagcaccgagtgggcagagttgataacagaggagaacagagattccccttgggcatagagtggggcgggaggccagagtacccggctttccttagagccacatctctgaagccctgtcatccgtcagttgtgagcacctcctctcctctcaggacctgtctgtctgcctcctagccgggtcttgcccttgagttgtgattccagccaggatgtatgggtactggcagacctcaatccggtgtctgcaccatctggcaatgcctgtgccaggactcttcttgtctgtctctgtctgcctgtttgtgtcttgtctttgtgtctgtcacacactcaggtggcagtttggtctctgggaactctttgaagagggtctcatgtgtgaggcaggaggaggtagcaggctagccctaggagagtccctttcctctttttagattctttctagaggccagaggagtggctgagctatggacaagcccttacactgatctcctaggagacagaagtggtagctgtgggcaggcccttgttcagcccaggagacaaggtgatgtctggtgctcttgctagagccagctccccttccagacacttgctcttccagccgtccactcaacctccgcttccagatgccaggctggtttgtccctgagggctgggggcaagaaaatccttggctgggcaagcctcctccctgtagcttctacaggatgttgacaggagcaggacagcctttgggggttgggctccctcctgcctcttcagagagcccctgaggttcctactcaagggtgagagcatcctatgatcactagccccttccctgtccagtacactgcctggcagagtcagagccagagacctagctcactggtagagtgatggcctaccattcacaggcacaatattaaataaaagagattgtcactgggggtggggtctgctctgggccagctgtagttcactcccacgtgctttgccttgtgaccttcgcagtatttccatgaggtgggtatttaaagaaatagaaaaccgggaccctacagagtaaggaacattgaaaaacttactcagggaacatagctagcagtacagagcccagacctccccataaccctcctccaccaggccatctagctacaaaaccaccgcaaggccagccacgttcgagggtcccaagacctgagtctagccagagcttttcattagccaacgctgtggttctgggccagttgtttcactgtgctggtttgcaggagccctgccagcacccaggacagccaagaatcttgcccaatgatgtcatcagcacctgcgcccagagttaaattagaaacagaagaactgagcctagtgggttgaaagacatggtctgtggaatcccacccaccacttttctcctggagtgcatttcttgagagactacaaacactgctctagcggtgtgtctagcctggttgactagaaatctaaactctacaggtataacgtatatggcaaatgtcaccggtgtgactgagggtagtcagagaagggactcaagaacgggaacctcagggcagttgggatctctggcctacagctctctcgtctcacctgctgctcgctcagacaatgagcatgaagggcatgcgactggctcgggagctctccatccaggtgcaggaaggaggcccaagctgggcagggtagagttggatgatgagtgggaagagaaggagttagtcctctctagtcttggccatcgtattcacccaatctcacttgtgcttccccagcagcctcagccgaaaacctgacgtttctgagtggagatcacccttggttaggctatgttcatctgtctgtccatctctcttcccattagctctgtctcctgtctactcatctaacagtgtccctgttcatgcgcccccccccacgcacacacacacacacacacacacacacacacacacacacacaggttttcttgtccccacccccggctctatctgtctgcccattctccttttcccctctggactggcctcccatacattcccacgtgtggacatccatcctccgatcatgtagccgcccatctttccatctgcttacaggccaacttccaccagttcccctgtttatttttccccgtggaccttgcctcctctgtctgcctgcctgccatcggcttctcctccagtgtccatctgtcctcatgcttctatctttctctccatgttcctccattcgccatacctcgtccccctgtgcactcgttcccagagactccatctttccattctacctccttccgtccatccattcagactcaacaatttaaggctcatgggacagcgtacctgaccccgggagcttcagacatgttataggatcagccatgtggaaatacaacagtcctcagagcacaacccaaaggaacttcctgtgacgtctgtctgtgttctctggggacaggacagggagcttagcctctcctccctgaacctgctgtccacagagctcctcaccctgcagcctgtcacaggtgtgcaccatggagaacctgacatcactgttgctgttgttgttaccctggcctcagaagctatcgctccagttccccagcctatggggccaggcctacaacttggggcagtacctcagggcttcacagagccttggacaacccattcccatagcactctagtcctctgtctgcactgtgccccagagagggggctgtccctaagacagtcccagcctgcgtcccagagcctgtggggctcatgtcccttgctgctcacctcactgctcctgcaaggaaccatgccctgctttctctgcttagaccctaaggattggcctgattgtagtatactcggtcagaagaacttctcagcccgcagctactgtattagtcatgagaatcccatgtcactccagcatttaagattgcaaatcatcttatctgagtgtgccaccagccccggggcccaaacataagacagaagcagaagaaaaaaaatgcacctgagtggtctttcaacttctctgtgttttaaccagcatctctggttctcactgtaccctgccccctcccccccagctgcatgccctccctgccccagctcctgtgtttgaccttctgtagcagttacagttgcatagtctggctgcatgctggagcacaggaggccttggcccctgcccagccctcggcacttgtgtaaggagctgtggcctggcagctgtgtattgccctccccctaccaccaggccatgagtctgttctcatttctttccagggaatctgactaagcacatgaagtcgaaagcccacagcaaaaagtgccaagagacgggggtgctggaggagctggaagccgaagaaggtactgtaccaacctcctctttccctaactccctctccacttcacatccctcccccttacccctgaccttccccctttccagacaccctcatttctactactgttccccttcctctctctccctcccaccatctttcccttctatgtcctcccttctagtttgctgaacaactgggaagcagcaaatgttaaattcataaaatgctccccagtgccacagagccagtcactgtgcagttcagtataacctagtgttccagcagaaagccagccccaacgggaactcggcgcacccagtgtgtgccaagcacagtctaaacacgtgccttgagttgtcttagtgggacctggatagatcttcaggcacttaactagaagtctcttctgataggaacctgcaatgtggtctgtgggactgcgagtgtcactgagaaaggcaaagctagatcgggtaggtccatcccttctcggccctgacacatcactacaacctgactatggtcctccagcatcagaaacaagctagaggcagactgatagcagacaaggcaggggacacgggtaaggagggaggccagaggggctgcggcagatagaatgacaaaccttagctgtagattctcaggagtcagggtcagggcttagtgtgacaagacgaagaagggagtgggtcaggggggtggggggcagagaagaaaggagaaagctgtggtttttattttctgtttgtgaagcaatctaacaagagttagatcatgtttcttttaacactgaataaaccaatgtttacaacaatccactcaaagcactgtcttcacaaattataatgtgaggcccccatgttgtcaaaatgcatgccaggctactatagatggtgtcctggcgagggccctgtaacataagcccagacatgggaccatgaaggaccatgaaagacagggggccttggctgacctctatcctctatccttgagtataatgggagtgatacatatgtcctctgcctgtgtgcggagaactccagcaggggtgtagggatgtgatctaggccagacacatgagcacagttcaggtgagaagtggtctgattccagatgctttcagagactgagcccatagatggtcctgctacatcatagagggcagaggaggggagggaaagggccagggatggctccaagctttgtaacctaagagactggaaggatggagttgttacttcatgcaccaaggcagacccagcgacgggcattaggatctgggtatcctaaacatagagttggtagcaggaactgccctgaagagcaccaagccaggatgccctagctccagcacactgctaaggaatgggttgtcagccactgccaccctgtggccagtcttagaaactgcacccagaaggttctgtccagtgccttccactagatttgaaagcactaaaggcagaaaaaggcccatatggaatatcaggaaaggggggggggtgctgagcaggcaggggaaccctttagatgcctgcaggaatcagatgtggagtgcctgaagtagtgtggtctggagagggcttcttccatcatccccgccacactgggactcatacagggggccttcactttctcctcagtaaagaagggctttggggcctgtcttgatggatgtcaggagatgctggccccaactccctccccagtcaggaccctgcttcagccttcatgtgcagatgctaacagtgccaccctggccacctgcctatgggagggggagacacagacagaggagatggtagcagacacaaaaggacataaaccagccattgtcacccagcaagaggagggcagggtggggattcgtggctgcatctgcttctcaaagcataatgccattttgaactgtagtgtgagacgtgaggactatgaaccttagttctgactaggccaggagatagctggatgattgtggggcaggccgtggccttctccacgcttgggtttcactatgtgagtgagggccagggctgagtaaaacctgaggcctgcagtcagggctcctgccaaagtcctaggtcagcagaatgagctgatgcagggctttgcccctccctccatcccctgtctgttatgtctcccatcacccattcccctcgaggcctcgtctcttcgctcccatctgcccaaactctgcccttggaacctccctctgcctgacaactccttctctacacacaattttctctctctttcctagtgaatgttcacgttatccactttggtacctgaccatggaggtgttagcatcactgtttctggccctcctgggcatggtggagagccagggctcggggactatctttcctgaccaggagaaatggaatattggtgcccgggcgagcgatagggatagtggacacattaggccacctggaaccagttcaaactggtcatgtcacagcagtctagtgatgggccaacagagcacaaactctccaggtcatcccccagattgtggacagctgaccatttcagggatgcctcggtctccattgctgatggtggcacagcctcaccagctgatggaaacctccactccataagaatccagacccggaagctgacgttcagagtgctccacagggcaggaatggcaggggtcaggcctgccctaaagactgaggccagcctagcccagcaactcacagaagctaaactctgccatctgcccagagccgctgtgtaggccagcctggtcatgttagcatctggtttgcattttaactgaccgtgactgtctgctggaccagccagcatgccctgtcccagagtgatagatgccatcagtaatggggtcatagtggctgtaattatctgggcccttgctgtgtaccaggcctgcattattttttcctctcagaaaaagccatacagtgagacatccacttaacaaaaggagagactgaggcacagcattacagctggctcgtggtgaaacccacactgagaaaccagaaagcagatgatcttgtttgccccagtgaagccctaggccttacttgggaaggttacctgatcccccttacctcggtttccttatccacagcatgagcgtaagaatagaacccccagttccccagtgatgccaggattctttgagggctacatgaattcacgtacctaaagcccgcagagctgaacttgttcgtcgaggcatgaggtcattgtacactattatttacagagtattcttctatctgctatgtcacttggtcgtctgccacgtggcactgtgcctagttggcaggcagtgaaaccgggcttagcctgaagtggctgtaatcttgagtatcctgtgctctcccctcaggaaccagtgatgacctgcaccaggactcagaggggcaagagggcgccgaggctgtggaggagcaccagttctcagacctggaggactctgactcagactcagacctggatgaagatgaggaggaggaagaggaggaggaagagagccaggatgagctgtctgggccatgctcggaggcagctccgccttgcctgccccccacactacaggagaactcctcacccgttgagggccctcaggctccagatagcacttctgacgaggtcccgcaaggcagctccatctcagaagccacgcatttgaccgccagcagttgttccacacctagccggggtacccaaggccttcccaggctgggactggccccactggagaaggacatgagctcagccccgagtcccaaggccacgtcccctaggaggccgtggtccccaagcaaagaagcaggcagccgcccctcactcactcgcaaacattcactcaccaaaaatgactcgtctccccagcaatgttcaccggcccgagaagctcaggcctcagtaacgagcacacctggtccccagatgggcccaggaagggacctgggccctcacctttgtgggtctccaagactggagctgtcctgtctcactccctaccccataggaagagaagcgcccgctggactcgagcgtgccacagacacaggcacccccagatattcacccaccaggagatggtctctgggtcaggccgagtcaccgccacagacagtgctgccagggaaatgggccctggctgggccctgcagcccctcagcggacaagagtggcctgggcttggggccggttccacgggccctcctccagcccgtgcctctacctcacacacttctcagcagaagccctgaaacgtgcacctctgcatgggtgagtccctgctgtggccctcccgggggtcagaagctgcccattcacaccctctgcccctcaccccagagccaggccggtattcctgggcatgtggcaagcttttcttaggtccctgtgtcagctagttcattgcactttgaggcaccctcagaagccccagacatggctctggtgttcacaggctctgggttcaagccctagtgggcagtgtagccttggatatggacgtaacacttgtgtaattcttcggccatcacttccctgtccatgtatgtccttggagcagtcgacagctttaccaaaatcatctgtccccatctcctccctgtggaactatgacagccttgcctctgtcaccaccatgccccaccacaccccgctactgcccatcacccttccttgacagtgcttgccttacagtatctgtaccactgcctcactgcccctccccccacccccgaggctgacactgtccacggctggcactgtccctgttgacatttcttacactgtgctgtcatgaccccacagcatctctcctggaagaacactaactgaagcatctctcttgcctcattgaacttcctgtagtgaaaggttgagatctttgggtgggaatccatatgcaagggtaaagttaggccaagaccatcttaagaaggggagaggcagaagagccaaggtagaccagggtgagcacagagctccccccacacccccccacacccccacacacacacacaagagctgcctcctacagatgtgggccaacatgtacctctaagttgcccagttggaagcttgccgagaactgcagtaggactcctgattctggccgtactcaccagccgtactgcaatctcaggcctccccaccctctataccgttagccctcagttctgcaggcacgtaacccttgccttctcccgtcttgttttctgactccagcggaagactgagtcccgaagtccatcagctggccctgctcctctcttcccccgaccattctccgcccctcatgacttccatggccacctccctagccgaagtgaggagaacctcttcagccacctgcctctgcattcccagctcctgagccgcgccccctgccccctcattcccatcggtgggatccagatggtacaggcccggccaggagcccagcccaccgtgcttcctggaccctgcgcggcctgggtcagtggcttctcagggggcggcagtgacctaactggggcccgagaggcccaggagcgcagccgctggagtcccacagagagcccttcagcatcggtgtcccctgtggccaaggtctccaagtttacactctcgtcagagctggaagaggaaaggaccggcagaggcccaggaagacctcctgactgggaacctcacagggctgaagcccctccaggacccatgggcacacacagcccctgctccccacagctgccccaaggccaccaggtggcaccttcctggaggggcctcttggggtcaccacacacactggccaacctaaaggcctcaagcttcccaccactggatcgcagcagctccatggactgcctggcagagacctccacttactctccaccccggagcaggaacctctctggagaacccaggacccgtcaaggctcccctgagctcttaggtagaggggagctcaggacacctctattcctgcccaagggtagtggccccccaagcatctagcctctacagctacttcagcgcctggcctccagtgtcggcagcagacatgcccagacaaccgcctggagtcatcttgctcccttgggcatcctctcccatctgtccatctgtccatctatccatgcagcttctgctcagccccatctgttctatttctccacatatgcagttacctgtgcctttttctagaccttttgttgcttgagaaaaaaaaaaagaaacaaaacaaatcacacacatccataaacaaaacaaaacaaaacaaaacgcatccctgaggagctgaaggctgtgagtgtgctctggggacaaggctggaggagggaatctcacctccaccaccaccatgtgccacatgggcagctgtccccacctcaaggtccaggagagggtctgtggcactgagagagaagaagaaaaggggagaaaaactgtaattaaattcaaaggcaagcactcctacagtcagatgcccaccatccccactgaaagacgcacagctcgtagccgcccttctctgccatcagagggacacaaatacaggcaggaaccaatctaccactccccaccctacccgaccaaggacattatcttttatcctttttttttttttcaagagtaggaaccaaaaagaaaaactactttctagcatctcagcagcacagactagcagcaggaaagagaagaattctgtagtatgaactgtggctctcacttctcccttccacaccccacctcccctcccctcaccccaccccatcccccaggctcataaaggagcccgggttgcccatctcctttctcctatacactataggtctctgcctcccaggcctggccaaaggctggctcctctatgattagaaatacctgcaggatgaagggaccaaggccggactagggatggtcctagtctgggcctgttttgagcctggggtttggattggttcacctctgtccctgaggaacaacatgtcacatttccttcatggctggattaacgtatgtgtgtgtgtatatagatacacagagagaaaccaaagatggtgtttggtactttctccagcctcctcagattctcctctgttaacttaggggatttgtaaattgttccaagtcctttgaatttttctccagctcccaaggcaaaaactctacttaaaaaaaaattatatatatatatatatatatatatatatatatatatatatatatgaccaaaaatttaaatcccaagttgaaatatggaatttgacctgttgcatgctttaaaaaaaaaggaaagcaagccccctgcggcacaggttctatggctaccatttctaagaccttccagaaataattttctttaccttcaccaaggaagagagagagaaatggaccatcatgaggagacccctcctacagccttgtccccaaatcacaaagcctgttccagccatgctagattctgctgtcacagtctacaaagcaagggcctgtctctgggcatcaggctgggtgtgtggctgagggctcacaggagggctgcgatgcaaggctaggggctgcctgtacaaggccacccccgtccctccctccagcttatgtcattctggtccttgctggatgggcagatcagccataggcccaatgtccaccccagttacctggtttctcctctgcctgactcaatgcttaagatgtaagcgtcagtaggactgttgcctctctgcaagtctcctgcctacctgggagaagctgtcaggaccaagctggaaggaagagggtagaagcctgggtgctggtcagcccaagctggaggcttttctcccttctgcctatcagccctaacccacaggccctactgatgctaagggctgagctggacaaaaacatcgcctcaaactgggcttggtagctttctaggctagagcttctggccattggaagaaggctagctcctgaccttgggatacctacacctctctacttcactctacacccaaatctatctatctttctccctctcccctccccctccccctcccccttcctccctctttcctcacttctctctccccttccccccatgtccacttctgcaacctagtgacagacaaatgtgtctacagaatagcccccacagttactaggcagccctgactcagggaactgggatgtaacaaagactaggtattggatatttgcctttaggtgacagggatagaatacatagagtctcaccgggagtggtgctccacgtgcccagagggttgcaatggatgccacttccaggcacagctctaagctcctcttccaagttgtctccccccaacccccaccccaagcacatggccccagcctaagcataccttctccacctggaaaaaactctcactccaggaatgtgctttgggctcctcgcccacaaccagccacttctgactttgcagtctgcctgtgacactactgtcaatgatgacagtctagttcagacatctgtgcggggtctactgaaacacactggcacaatatggccttgccacagactctgcttctccttacctgtgacagctggggaggtctcaaatcaaatcagccctgcctgggtggtggttccaagccactcatccctgaggcctgacccctagatgctcttccctgggcaacctcacatcattctaagtctaacttaaccccttccacaccaagggcaggcccgcttcttccaaccccccatcatagctgatactctggtcccagccaccaagaccctccaggggttctgacaggggtagctacctattttttttcccagacacaaagtctctgcctgcctcagcgggcaaacctcttaagagaaataactcccaggtccctctgggtgttgtctgccccccacctggcccccagaagaaggaatatgtctgagctgaaatctcctcctagtctttgctccagctgactcttccaggtgacgtcctgggagacagatctgctctgcaatgtcttctgagaaaattcctaaggtcagtgccgccaaattcgctcccgtgttgtggttcctgtctgcttggcatctgaaaaccgcttgggcactactggtcactttcctcagtgtggtgatcaaggaggaagggaacggtgcaggcaaatgtaagatacttacactctgtaagataaatctctgcctctgttgtttgttttcttttttaaaggtgtacgcattctgtacgtgaaatcgtctgtagagagtttccacgttcttaaatggcaatacattccaaaactcgtactgtagatatgtacagcaaccgcactggaaagggggtagttttgcctgtggttttatttaaactccagtttctacacttgtatcttgcagttgtcggtatggtattcatcagtgcaaaagaaaaacaaataaaaaaaaaaactcaaacaaaaacaaaagaaaaaagaaaaaaaaagaaatcttacacaggtctaaagcacagagtctgttatacaaaaggaaagaatcgctcagtattggtatgtgtgacccttgttgtaaatcccatctgtactgtgaatgagacgtttttacaagtataataattgcctttattacagcttgggctgggtgttcagcctgaagatattttttaaaaaaaaatatatagcacgttggaataaatttgaaaattcccaacagagccctgttggcctggctcatggcttttcttcctcaattttaagtttagttttatgtatgtgtctgtgtgagtgtacgttcaaagtagggggtgcccacggaagtccgaagaggatatcagatcccccgaagctggggttaaagatgttagtgagctgcccagtgtgggtgctgggaattgaaccgaggtcctctggaagagcggcaaatgcttttaaccactaagccagcctcaccctggcttttctggaggataacagaatattagggttaggagaacactagatgtcagaagcatttatttcattgcacagccatcagtgcataagaaggaaatgatggtcatggccacatagcctgggactcccttcccctcacatcctagcctgtcagtaaatgcctcagattgtcaccatgggagagaagcctgacttcgtccctaggattgccacagcgacattttacctggctttaagacctcaggactccccaacagtcctggaactcgggagtctgaagtcttcatctatggccatgctgccttgaacatggccattctcatcggtctttgaagctgagaagaatggggtctggttagtatctgggagttatctgaggtctggatattgctgagttggttcttctactctgaggagatgtcctcagcttccggtgggtacagacacatccaatctcctgactcctccacacttctatgatcccttctcaacgtgcccaccaagacccttaattacagcagctaagaccctttttctaaacaaggaaattcaggaattatgacataaaaccaccattgagagccactattgagccagctataggatggaacctgaatccagatcctgccacagccactgattgcctgtgtgagcatgggaaggtcatctaacctctctgtgcctgtttgctcatctgtaaaataggaggtgatgctccacctctgagggccattaggaagatgtaaaaagatggtgcaggcagggaggccatggataccctgaacacagtggggcttctgcagtttatgcacagatactgggacagccaggatggcaaaatgtggtttcccaacttctatattcaactcagtgccagccaaggctgccattgggtggggtgatgagcaagagagagagggcccacctgcagagagcttctgtctgagctggctgtgggcagtcactttgccacaggctcaccttcagcagtgtcagagaacaaaggctctaggctacaagccattggagtatcatgaaagctcttctagaaaaagcccggtaacagcaaggaaaggaaaacaggccaatgaccaagtggacagcccttggaacaggtcagtaagccaagtggagggcccttgggacaagccagtgagccaagtggagggcccttgggacacacgctaaccagaagttcagctctaagggcctaaaagggtgggtttacttaggcaaagaggatcaatgccaacttacagaaaagatgtaccagcaccacccctgccatgtggtgggctctttgcagacataatgagagctggttggcagagggctggggagtggaggggatactgaagaaccttggaggccaagatggaaaaggatgctttgtcctagacctgggcgcaggcagctgggcagtagcaggagagcttcagggatggtctattcattatggggaacaaatgctgaacattgtggctggtggagtaagagaggcctgggtgggggaaggagacttgggagtccagaaaaaaagagggagaagtcagcatgtcttagtgacagccacagagagtgttcggtgaggggttttcttgggaactgagaagaatcgcctgagaagctactaacaaagccaaagagacctgagaagacctgagggagcattgagggcagtgagagaaagtccccagaaaagaaggatggtatcttacaagaccagaggctgtggtcactgtctgcttcactgttcattcctataatggcggtcggcagccagaccgtactcttccaagcatggctcctgccagcccacagcagagtcccagtgagtggggaagagaggaggagaagctgtgggccatcaggtgaggacggaggatgtattagttagctctctagtgctgtgacaaacagcaccatggccagtggcaacctggagaggaaagggttaatttcatcttatagcttgtagtctaccatgaagggaagtcaaggcaggaaccccgaggcaagacctgaagccgagaccgtggaagtgtgcagcttattgtcttgtttccccacagctggctcagcaggctcccttttacctcctgcccaaggctcacaccaccccagtgggctaggctgtcccaaatcagtatctcacgggcttgcctgcagggcaatctaaggtaggcattttcttaattgagcatccctctgcccacctgagtagcttgtgttgaactgaaaaagcaaaagcaaacaaaaaaacaaaaagaactaagcagacaaaagccatggccacacaatagttgttagaatgcagaaaagatgggctgtgatctgcctttagcttctgtctggggatgagaccatagtgaatggagcctgtggaccacagatgctgaagaggcagaggccaagatgtgagtgcctggtggcggtagtgcaggcagcaagtgaggatcttctctaatgatgacagggctggggatgtagatcaggtctaggagccagggtataccagtcaggacaggctccacagtgctgctgggacaagcatgcctgacatctgtggccgaaggcagcaacggcctcttccttccctcactgtacattcagtggacatcagcagagaagttctgctcaccccagtgacttagcagatccagactgatagctgctccattcctgtgttcccatgatcctcggaagcagagaaaaggatagtattggccctggcaacaaatatcctgtcagagtcagccttcattgtcaacttgcaggaatctagaatcacctgggagattggtgaggtatatgcccggtgtgtctctgaggtgtttccaaagaatggtctctgagcggggacgcacttaacatatgagcaccattccatggcccagacagaataaaggcgggggaagatgaagctgggtggagattggcatgcccttgtatactgccttctggtccatgctgtgaagcatactgtccaacttcacctctcctgccacagtgggctgagcccaccgacaccaggagccaaaacacacctttcgccccttggctgatggcaggtattccatcacacggacatagaagtaactcaaacacatccctacaagtctcattacaggaaagagccagacacacagtcaggtctcagggaggacacaggggtgctgggaagcagcctctgggtcgtacaaggttaggaattcccagagccaaaggagcagaggcccgtgatgagatggggaggggacagtgacagtggtgtcaccctcagaggggatgcacttttataggaatctggggtggggtgaccccaaagacagcattggaagcagagagggtaccctgctgaagtcatggtgtgcacggataaagaatggagccaggaggataccctaaggggagaacagaaaatggggacaaatagagtcagggacactcacacaaggcagcaggaaagaggagccctgcccagaagaggatgcaacaggctctctgtgtccagagctttgcaaattcagcctgtagtgctgacaactgcccagcatggtgagttcaggcgccattcttagacaaaagccagaagtggtgccagtaagactaaaggtcacccaagtagagtgacacatgcctgtaattccaaccctcatgaggcctaggcaggaaaatctcaagtcagaagccagcctgggctacagtgagagcctcttgctatggctggctctggtgcagcctttcaaggaatccaagtccctccccttatcctccagtccctccctggctctggagtagtgttgggtatcaggctgcacagctagctgcctctgtttggagtccagctgcagctctctccaggatgctctgtgcatttcacatcagttgctgctatctcctgcctgctactggctcagtgccaagccagacaaacactgccatgccactgggctcccaggtttttgtacaggtcaagagctggacccctttgagaagtgaatagggcagattgcatatttattacaggtgaagacagcacctaagatcacactctcacaagtggtagggctataatcctgtcgcatctgttccagcatccccagagagcaatggctgacatcttgcctaagctctgctgggtctccatccagatgtgggtgaagtccacaggactggaagatcttcctgtcattcctaacactatatccattctgggatcaggcctaaagtctttgcaggacaggccattgcaggcaggctagcctcaagaggatggtggtccacaggggcaagagcctgagaatgctgtggcctgggcctccattatcagcacgggtgatgtcctgaatccctgggagagggacatttatgacactgttatcttttgcatgatagggggcctgggctctgatacatgatctccatatttgattagctgcccatagagagtctgggcctctatagccctgggatccctattgaggcttgggtaccccagctcaaataccctgtactcctataatgacctcatccactttaggaagatacgagtgccaattgccctctttctgatgacaaaaatggaggtccagagccgggaagagcttggcctgaggccaggtctaggattcccatattctccacagatctacatgtaccaccccacctaaccccagtcccaagtgctactacccagctcttctgcccagctctgcctttttaggaaaggaaaagagcagccctggtggctggcaggcgggcaggcaggcaggcatgctaatccaccagctcccggcagctctggttacccgtggtttggggcccgggcagccctggctgggagtgccagctcagccaatgggtgccgccgctgagctactctggcagagccatacaaggcctggttgcctcccagtcctgatcaggcaaagggcagctccggtgtgccagtacccaccccacccctgagtctgccaggccggcacgtcctccaattctacctaatccagtctgagagcaggcaaaccttcggtgcacgtgcgcccggcctaggtctctctgaggtcagggatgtggcaccatcagagcagagaccagagtcagggaagaagcttagttggtcacagggacacccctcaatacctaatgaggtcagggtgattctggccaagacctggttcggactgcatcatctctgacgagtgtgtctgctatcaccccctttgaccttgtcacctctgcttttgcaaagtctgtggcgttcataccttgtagtgtgttcccagcatctcactcaccctaagactacaagttcctctaagaattagggatgcccataaatgcctacatgttgtgagacatgcatccttggggacctgtgtgcatccattgtcactgctgtgaacgataagaccttatctcaaaaataagttgaacagtgatagaggaagacatgtgatgtcagcctctggcctccatatgcatgtgtgtgcacatgtgcatacacatatgtgcacacatacagagatatacacacataaaccatgcatacatgtgcatacacatatgtgcacacatacagagacatgtatacacataaaccatgcatacatgtgcatacacatatgtgcacacatacagagacatatacatatataaaccatgcatacatgtgcatacacatatgtgcacatacacacacacacacacacacacacacacacgaaccatgcataaactgctcgagtgagcacacacacacacaccggagattatttgtggaaagcacaatattgacaatcagggaaagtaagtcacagagcagagtggctctttctttacccaattccagtagcattcaacctttgacctagacctctgtaccctcaagcctcccctgtattcaggccctagagggaagcagtctggtcccatgcaaaccagtgtgaaggcaggattgaaagctgtgacctagttcctgagtgtggtaggacccctgcaccaacattacctaggcattggcatggccacaaccatccattttagagcatctctgaccacggcaaacaatgagatttatcacagaaggcacataagcatccttataagtcctacatagccaagctatgctcagggccaaaactgtggtactgtgaagggccactgacaggtgagaaaaacatgctggcacgggtgggggtggcaggcctgcctggcattggactctgtttgctcacccaagaaaagaggagataaatatagacacaggattactcagacatagcctgggaaaaccggctcctgagccttgacttcggctctgtcccagcctcaccctcagctgcctgcctactctgtgccaactgccgggcctgccccacctccttctaggactccctacctggcaacctggggacagcccttcctatctgctctctctgggtatggagcagaaattatagtctggagagagttgagtctagctgggagcagcaaagccctgtgtggggttaagccacaggctcagcttccattccagcatagactgtttccccttctgtggagtagatgaccagtgcaaccgtccttcagcgttcctcggcctgcatgtaggatgcgatgggagaccactcgaccattagggatgaggctggggtatcctgaatgagaaggtgctagccatagcaatgtgcataggggctgtaccctcaggccacagagccaagacacagagagtgaggtcccacccgctccacttctcagctgtgggactttgggaaatctctttgacctctctgtgcctcagtttcctcacatctaaagtgagaagaggctattaataataatgacatattattactacgaaatataataaatattacatagtagaataataacttaataatcacatgggccattagaggttagatgttactacatgcaaagtacaccttactgcaaggcccagcacatgcaaactgttacatgcaaactgttacatgctttatttagtcaggacaggtggggctctgagaccctctccttctctgctcactccatgaacctggccgcatactacataggtcctattgtctaggcccttgcagttcctcctctctatcctgactggcagcctctag

SEQ ID NO: 903 - DNA, 8761 bp, Mus musculus
acgctaccccttcctcagggagaagcagcgtgtaagcagaggctttgtggccggagtggacatgaatgctggcttccagagagagcagcgcttcagttttggtcatcggaagtggtgcctgcagcgcagaagaccgtgatttctcctccgaggctgctattctccaatacagaattcaagggcagaagagggccgccccagcatccattgtggcatctctccggcccggactagggatgacaggcccatggacatggatgtctccgaccttcagctgttcatatagcacacaggggactcgtgggggccgcttgtcacccaaacccactcaatggcaatactgacatcttccaggctgttttcaagacaggcgttcaggcagaaaaatgccagtatgctttctgtctgcagagtagtgggctatgccacaccaatatgaacagcgtgggccctgggacctgctctgagtccacttgcagccactgacacttgaggggattaaaaaaaaaagcccagccccaaaaccatcgtggggttggcttccatggctcttgaccaatgtggccaaagctagacacctcgggacacttggattattcataaatgcgacctaccccaaactccctgagtagcatctgaagtcttgtgaaggtcatggatcctgaccaaagcatcaagggcaccaagaaggctgatggaagtccccggaagcggctgaccaaaggagaggccattcagacgagtgtttcttccagtgctccatacccaggcagcggcactactgctccctcagagagtgccacccaggagctcctagccacgcagcctttctcaggcccctctcaggagaaaacgggccagcagcagaagcctgcccggaggccttccatcgaggcctcggtccacatctctcagcttccgcagcaccctctgacaccagcattcatgtccccgggcaagccagagcatctcctcgaggggtccacgtggcagctggttgaccccatgagacctggaccctcgggctcctttgtggcccccgggctgcatccgcagagccagctcctcccatcccatgcttctatccttcctcctgaggagctgcctggcatccctaaggtctttgtgcctcgtccctcacaggtctccctgaaacctgcagaagaggcacacaagaaagagaggaaaccgcagaagccaggcaagtatatatgtcaatactgcagccgaccctgcgccaagcccagtgtgctccagaaacacattcgctcacacacaggtgagaggccctacccctgcggcccctgcggcttctccttcaagaccaagagtaacctctacaagcacaggaagtcccatgcccaccgtatcaaagctggcctggcctcgggctccagcagtgagatgtacccccctgggctggagatggagaggatccccggggaagagtttgaggaacccaccgagggagaaagcacagactctgaggaggaaacgggtgccgcatcaggtccctccacagatgttctccccaaacccaagcaccccctgctctcaagtagtttgtacagctccgggagccacggttccagccaggaacgctgctccctctcccagtcaagcactggcccatcactagaggaccccgccccatttgcagaagcctcatcggaacatcccctgagccataaaccggaagacacgcacaccatcaagcagaagctggcactccgcctgagtgagaggaagaagctgatcgaagagcagacattcctgagcccagggagcaaaggcagcacagagtccgggtacttctcacgctctgagagcgctgagcagcaggtcagcccccccaacaccaacgcaaagtcctacgcagagatcatcttcggcaagtgtggacggattgggcagcggacctccatgctggcatccacctctacccagcccctactgcctctatcctcggaagacaagcccagcttggtacctttgtctgtgcccaggacacaagtgatcgaacatatcaccaagctcatcaccatcaatgaagccgtggtggacaccagtgagatcgacagtgtgaagcccaggaggagctctctaaccaggcgcagcagcgtggagtccccgaagtccagcctctaccgggactcactatcgtcccatggggagaagactaagcaggagcaatcactgctgagcctccagcacccacccagctccacgcaccctgtgcctctcctgagaagtcactcaatgccttctgccgcctgcaccatcagcacccaccaccacaccttccgtggtagctactcctttgatgaccacgtcgctgaccccgaggtccccagccgcaacactcccgtgtttacctcccacccacggatgctaaagcgccagccagccattgaattacctttggggggtgagtacagttccgaggagcctggaccgagcagcaaggaccccacctccaagccctccgatgaaccagaacccaaggaaagcgaccttaccaaaaagaccaagaaggggttcaaaacaaaaggcgcgaactatgaatgtaccatctgcggtgctcggtacaaaaagagagataattacgaagctcataagaagtactactgctctgagctccagatcacaaaagcccactctgtaggtgctcatgaagtggaaaagactcaggctgagcctgagccttggtcccagatgatgcattataaactgggggccaccttggaactcactccgctgagaaaaagacggaaagaaaagagccttggagatgaggaagagccacctgcctttggcagcccaggcccttcagaaacagctcataaccgtcccctggggtccaccaagtcaccagcagaagcaagcaaatcagcgccctctctagagggacccacgagcttccagcccaggactcccaagccaggagctgggtcagaaccagggaaggagaggagaacaatgtccaaagaaatttccgtcatccagcacaccagctcctttgagaagtctgacccaccggagcagcccagtggcctggaggaagacaagcccccggcccagttctcatccccaccacctgccccgcacggacgctccgctcactccctgcagccaaggttggtccggcagcccaacattcaggttccagagatcctcgtgacagaagaaccggacaggcctgacacagagcctgagccgccccccaaggagcctgagaagacagaagaattccagtggccccagcgcagccagacactggcacaactcccagcggagaagctgccacccaagaaaaagagactccgcctggctgagatggcgcagtcctcgggggagtccagctttgagtcctccgtgcctctgtctcgaagcccaagccaggagagcagcatttctctgagtggctccagccgctcggcttcattcgacagggaagaccatggaaaagctgaggcccctggacccttctcagacacacgctccaaaaccttgggctcccacatgctgactgtccccagccaccacccacatgcccgagagatgagacggtcagcctcagagcagagccccaatgtgccccattcctcacacatgactgagacccgaagcaaatcctttgactacggcagcttgtcccctacaggaccatccttagcagtgcctgctgctccgccacccccagccgccccgccagaaagaagaaaatgctttctggtacgtcaggcctccctgaacagacctccagaagccgagctggaggctgtgcccaagggaaaacaagagagcagtgaggagcccgcagccagcaagccttccacaaaaagctctgtgccccagatctctgtgggcactacgcaaggtgggccttcagggggcaaaagccagatgcaggacaggcccccactgggatccagcccaccctacacagaagctctgcaagtgttccaacctctcggcacccagctgccccctccagcctctctcttctccttgcaacagctcttgcctcaggagcaagaacaatcctctgagttcttccccacacaagcaatggccggcctcctctcctccccatactccatgcccccgctcccaccttccttgttccaagccccaccacttcctctacagcctactgtgctacaccccagccagctccatctcccccagctcctgcctcacgctgcagatatccccttccagcagcccccttcctttctccccatgccatgccctgccccttcaaccctctccggatatttcctccctctgcaatcccagtttgcactgcagctccctggtgaaatagaaagccacttgcccccagtcaaaaccagcctgccccctctggccacaggacctcctggcccctccagcagcacagaatacagcagtgacatccagctgcctcctgtgactccccaagccacctccccagctcccacatcagccccaccactggcccttcctgcctgtccagatgccatggtgtcactggttgttcctgtccgaatccagacccatatgccatcctatggaagtgccatgtacaccactttgtctcagatcttggtcacacagtctccgggtagcccagcaagcacggcccttaccaagtacgaggaaccctcctccaaaagtatgactgtttgtgaggctgatgtatatgaggctgagcctgggccatcgagcataagcaaggaacaaaacagaggttaccagacaccatatctgagagtacctgaaaggaaaggcacttcactgtcttctgagggtatcctgagcctggaggggtgctcatccacagccagtggaagcaagcgcgtcctttccccagctggcagtcttgaacttaccatggaaacccagcagcagaaaagggtaaaggaggaagaagcttccaaggcagatgaaaaactggagcttgtgagtacctgtagtgtcgtgctgacaagtacagaggataggaagaagacagagaaaccccatgtgggtggccagggccggagcaggagggaggcagaaacactgtccagcttgtcttcagatgtatccgacccaaaagaactttctcccctctctcattccacattgtcccatgggacagccccaggctcagaagctttgaaggaatatgcccaaccatctagcaaagctcaccgaagaggtctgcctccaatgagtgtaaagaaagaagatccaaaggaacagactgacctccctcccctggcaccccctagttctctgcctctgtcagatacttcccctaaaccagccaaattgcaagaaggtacggactcaaagaaggtactgcagttccccagcctccacacaaccactaatgtcagttggtgctatttaaactacattaagccaaatcacatccagcatgcagataggaggtcctctgtttacgctggttggtgcataagtttgtacaaccccaaccttccaggggtttccactaaagctgctttgtccctcctgcgatctaagcagaaggtgagcaaagagacatataccatggccacagctccgcatcctgaggcaggaaggctggttccatccaactcccgaaagccccgcatgacagaggtgcacctcccgtcgctggtttccccagagagccagaaagacccagctagagtggaaaaggaagaaaagcaagggaaggcggaggaaggtactcccacttccaagagaggcgagccggcgagggtcaagatcttcgaaggagggtacaaatcaaacgaagagtatatatatgtgcgaggccgcggccgagggagatatgtttgtgaggaatgtggaattcgctgcaagaagcccagcatgctgaagaaacacatccgcacccacactgacgtccggccctatgtgtgcaagcactgtcactttgcttttaaaaccaaagggaatctgactaagcacatgaagtcgaaagcccacagcaaaaagtgccaagagacgggggtgctggaggagctggaagccgaagaaggaaccagtgatgacctgcaccaggactcagaggggcaagagggcgccgaggctgtggaggagcaccagttctcagacctggaggactctgactcagactcagacctggatgaagatgaggaggaggaagaggaggaggaagagagccaggatgagctgtctgggccatgctcggaggcagctccgccttgcctgccccccacactacaggagaactcctcacccgttgagggccctcaggctccagatagcacttctgacgaggtcccgcaaggcagctccatctcagaagccacgcatttgaccgccagcagttgttccacacctagccggggtacccaaggccttcccaggctgggactggccccactggagaaggacatgagctcagccccgagtcccaaggccacgtcccctaggaggccgtggtccccaagcaaagaagcaggcagccgcccctcactcactcgcaaacattcactcaccaaaaatgactcgtctccccagcaatgttcaccggcccgagaagctcaggcctcagtaacgagcacacctggtccccagatgggcccaggaagggacctgggccctcacctttgtgggtctccaagactggagctgtcctgtctcactccctaccccataggaagagaagcgcccgctggactcgagcgtgccacagacacaggcacccccagatattcacccaccaggagatggtctctgggtcaggccgagtcaccgccacagacagtgctgccagggaaatgggccctggctgggccctgcagcccctcagcggacaagagtggcctgggcttggggccggttccacgggccctcctccagcccgtgcctctacctcacacacttctcagcagaagccctgaaacgtgcacctctgcatggcggaagactgagtcccgaagtccatcagctggccctgctcctctcttcccccgaccattctccgcccctcatgacttccatggccacctccctagccgaagtgaggagaacctcttcagccacctgcctctgcattcccagctcctgagccgcgccccctgccccctcattcccatcggtgggatccagatggtacaggcccggccaggagcccagcccaccgtgcttcctggaccctgcgcggcctgggtcagtggcttctcagggggcggcagtgacctaactggggcccgagaggcccaggagcgcagccgctggagtcccacagagagcccttcagcatcggtgtcccctgtggccaaggtctccaagtttacactctcgtcagagctggaagaggaaaggaccggcagaggcccaggaagacctcctgactgggaacctcacagggctgaagcccctccaggacccatgggcacacacagcccctgctccccacagctgccccaaggccaccaggtggcaccttcctggaggggcctcttggggtcaccacacacactggccaacctaaaggcctcaagcttcccaccactggatcgcagcagctccatggactgcctggcagagacctccacttactctccaccccggagcaggaacctctctggagaacccaggacccgtcaaggctcccctgagctcttaggtagaggggagctcaggacacctctattcctgcccaagggtagtggccccccaagcatctagcctctacagctacttcagcgcctggcctccagtgtcggcagcagacatgcccagacaaccgcctggagtcatcttgctcccttgggcatcctctcccatctgtccatctgtccatctatccatgcagcttctgctcagccccatctgttctatttctccacatatgcagttacctgtgcctttttctagaccttttgttgcttgagaaaaaaaaaaagaaacaaaacaaatcacacacatccataaacaaaacaaaacaaaacaaaacgcatccctgaggagctgaaggctgtgagtgtgctctggggacaaggctggaggagggaatctcacctccaccaccaccatgtgccacatgggcagctgtccccacctcaaggtccaggagagggtctgtggcactgagagagaagaagaaaaggggagaaaaactgtaattaaattcaaaggcaagcactcctacagtcagatgcccaccatccccactgaaagacgcacagctcgtagccgcccttctctgccatcagagggacacaaatacaggcaggaaccaatctaccactccccaccctacccgaccaaggacattatcttttatcctttttttttttttcaagagtaggaaccaaaaagaaaaactactttctagcatctcagcagcacagactagcagcaggaaagagaagaattctgtagtatgaactgtggctctcacttctcccttccacaccccacctcccctcccctcaccccaccccatcccccaggctcataaaggagcccgggttgcccatctcctttctcctatacactataggtctctgcctcccaggcctggccaaaggctggctcctctatgattagaaatacctgcaggatgaagggaccaaggccggactagggatggtcctagtctgggcctgttttgagcctggggtttggattggttcacctctgtccctgaggaacaacatgtcacatttccttcatggctggattaacgtatgtgtgtgtgtatatagatacacagagagaaaccaaagatggtgtttggtacttt

SEQ ID NO: 904 - protein, 2343 aa, Mus musculus
SLVKVMDPDQSIKGTKKADGSPRKRLTKGEAIQTSVSSSAPYPGSGTTAPSESATQELLATQPFSGPSQEKTGQQQKPARRPSIEASVHQLPQHPLTPAFMSPGKPEHLLEGSTWQLVDPMRPGPSGSFVAPGLHPQSQLLPSHASILPPEELPGIPKVFVPRPSQVSLKPAEEAHKKERKPQKPGKYICQYCSRPCAKPSVLQKHIRSHTGERPYPCGPCGFSFKTKSNLYKHRKSHAHRIKAGLASGSSSEMYPPGLEMERIPGEEFEEPTEGESTDSEEETGAASGPSTDVLPKPKHPLLSSSKSGSHGSSQERCSLSQSSTGPSLEDPAPFAEASSEHPLSHKPEDTHTIKQKLALRLSKKLIEEQTFLSPGSKGSTESGYFSRSESAEQQVSPPNTNAKSYAEIIFGKCGRIGQRTSMLASTSTQPLLPLSSEDKPSLVPLSVPRTQVIEHITKLITINEAVVDTSEIDSVKPRRSSLTRRSSVESPKSSLYRDSLSSHGEKTKQEQSLLSLQHPPSSTHPVPLLRSHSMPSAACTISTHHHTFRGSYSFDDHVADPEVPSRNTPVFTSHPRMLKRQPAIELPLGGEYSSEEPGPSSKDPTSKPSDEPEPKESDLTKKTKKGFKTKGANYECTICGARYKKRDNYEAHKKYYCSELQITKAHSVGAHEVEKTQAEPEPWSQMMHYKLGATLELTPLRKRRKEKSLGDEEEPPAFGSPGPSETAHNRPLGSTKSPAEASKSAPSLEGPTSFQPRTPKPGAGSEPGKERRTMSKEISVIQHTSSFEKSDPPEQPSGLEEDKPPAQFSSPPPAPHGRSAHSLQPRLVRQPNIQVPEILVTEEPDRPDTEPEPPPKEPEKTEEFQWPQRSQTLAQLPAEKLPPKKKRLRLAEMAQSSGESSFESSVPLSRSPSQESSISLSGSSRSASFDREDHGKAEAPGPFSDTRSKTLGSHMLTVPSHHPHAREMRRSASEQSPNVPHSSHMTETRSKSFDYGSLSPTGPSLAVPAAPPPPAAPPERRKCFLVRQASLNRPPEAELEAVPKGKQESSEEPAASKPSTKSSVPQISVGTTQGGPSGGKSQMQDRPPLGSSPPYTEALQVFQPLGTQLPPPASLFSLQQLLPQEQEQSSEFFPTQAMAGLLSSPYSMPPLPPSLFQAPPLPLQPTVLHPSQLHLPQLLPHAADIPFQQPPSFLPMPCPAPSTLSGYFLPLQSQFALQLPGEIESHLPPVKTSLPPLATGPPGPSSSTEYSSDIQLPPVTPQATSPAPTSAPPLALPACPDAMVSLVVPVRIQTHMPSYGSAMYTTLSQILVTQSPGSPASTALTKYEEPSSKSMTVCEADVYEAEPGPSSISKEQNRGYQTPYLRVPERKGTSLSSEGILSLEGCSSTASGSKRVLSPAGSLELTMQQQKRVKEEEASKADEKLELVSTCSVVLTSTEDRKKTEKPHVGGQGRSRREAETLSSLSSDVSDPKELSPLSHSTLSHGTAPGSEALKEYAQPSSKAHRRGLPPMSVKKEDPKEQTDLPPLAPPSSLPLSDTSPKPAKLQEGTDSKKVLQFPSLHTTTNVSWCYLNYIKPNHIQHADRRSSVYAGWCISLYNPNLPGVSTKAALSLLRSKQKVSKETYTMATAPHPEAGRLVPSNSRKPRMTEVHLPSLVSPESQKDPARVEKEEKQGKAEEGTPTSKRGEPARVKIFEGGYKSNEEYIYVRGRGRGRYVCEECGIRCKKPSMLKKHIRTHTDVRPYVCKHCHFAFKTKGNLTKHMKSKAHSKKCQETGVLEELEAEEGTSDDLHQDSEGQEGAEAVEEHQFSDLEDSDSDSDLDEDEEEEEEEEESQDELSGPCSEAAPPCLPPTLQENSSPVEGPQAPDSTSDEVPQGSSISEATHLTASSCSTPSRGTQGLPRLGLAPLEKDMSSAPSPKATSPRRPWSPSKEAGSRPSLTRKHSLTKNDSSPQQCSPAREAQASVTSTPGPQMGPGRDLGPHLCGSPRLELSCLTPYPIGREAPAGLERATDTGTPRYSPTRRWSLGQAESPPQTVLPGKWAGPCSPSADKSGLGLGPVPRALLQPVPLPHTLLSRSPETCTSAWRKTESRSPSAGPAPLFPRPFSAPHDFHGHLPSRSEENLFSHLPLHSQLLSRAPCPLIPIGGIQMVQARPGAQPTVLPGPCAAWVSGFSGGGSDLTGAREAQERSRWSPTESPSASVSPVAKVSKFTLSSELEEERTGRGPGRPPDWEPHRAEAPPGPMGTHSPCSPQLPQGHQVAPSWRGLLGSPHTLANLKASSFPPLDRSSSMDCLAETSTYSPPRSRNLSGEPRTRQGSPELLGRGELRTPLFLPKGSGPPSI

SEQ ID NO: 905 - DNA, 138808 bp, Homo sapiens
  misc_feature (1)...(138808): n = A,T,C or G
tgccagagtccaaagcccccctgcctccctgccagcccttggaaaacagctgttatgacccagtgaggctggcccctgccaggcatccaggatttttctttaaccctttgtcagctgcagtgatgccaacccccagtgcccagaccggatgcggcccctaccagctgctggcaaaggccttgctttgatgtgttggtggagagtggagagcaagggccctccctcctcatgattttgggtggggccagcagaggagctggccctggtccttcctgccctgggtgggtgccaccttgcagatgggcccctctacccctagtagccccctccctgttcaactgttttctaaaaagaagacacttttatatcagtttctcaatttttattatggtaaaatacacataacataatttaccatcttaatcatttttaaatgtacagtttagtgttattaaatacattcaaaaagttatgcacccatcaccaccatccatctcttcttttctctttctttctttcttccttttcttccttacttccttcctttctttcttttctttctttctctctctctccctttctttctttcctttttctttctttctctctctctccctttctttctttctttccttttcctttctttctctctccttccttccttcctctttctttctttctttctttctttctctctctttctttatttctctgtctctctctttctttctttctcttctttctttgtataaacttaaggggtacaaatgcaattttgttacatggatatattacatagcggtgaagtgtgggtttttagtacaaccgtcacccaaataatgtacattgtatgcagtaagtgatttctcatcccttacccttcccactctcccaacttcagagcctccagcgtctattattccacacttcgtgtccatgtgtacacattatttagattccacttataagtgagaatatgcagtatttgattttctgtttcttagttgtttcacttaagatattggcctcttaactgttttcatcttgtaaaactgaagttctgtgcttattaaacactgaccccccattctgctctgccccagttccggacaacccctattctaccttctgtctctatacttttatatcattttcaaattacaaaagtgatacatgcttagtgcttaaaaaaagaacagtatggaaatgtagaaacaagaacgcatgtttcaagccccacccattctgcagtgccctccaggacaagattgcatcccccaggtcctttccatccgtcacagctacacagatagatgtgtgtctgtgattttgcttttcaccatcccgttgagaggaagtgtgtgtcacagctgagagtgcagtctccagagtctaacagaccaaggttcaccgcttggtcaggccttagcctctgtaggcctcagatggaaaatgggggcagaagtggcaccttccacccggcagactgttgagggaggggggcagggagactacctgtgagaagcgctgaagcttgtacgtcacatagacaaagcttgatacatagacaaagccacaatgaatctctgttattggtaggagtatatgtttatctttaagaaaagttatgttcccatgactattccattgtgtgtatttatcatcatttacttattaaaccaatttcctgctgatggtcattaaggctgcatccatcctcactgttaaaatagtgctacagtgatcatccctatgtgtgcatgtgtgtgtatgtttgtgtatgatgatgtgtgtgcacactgcaaagctgccgagtcaacatacattttggtagacacggttaaaagattctcctcatctatacctactagcagtatttgagaagtatttgatgacgactcctccctccaccacttgatggtagcaatcactttcctctttgctaaccaaatgggaaaaggtgataccgattttttttttttttttttttttgagatggagtttctctcttgttgcccaggctggagtgcaatggcacaatctcggctcactgcaacctctgcctcccggtttcaagcgattctcctgcctcagcctcccaagtagctgggattacaggcatgtgccaccatgctgggctaatttttgtatttttagtagagacggggtttcaccatgttggacaggctggttttgaactcctgacctcaagtgatccacatttttaaatatattctttattaacgaggccagcattttgcatatatttattagacatttttatttcttaagcaatgatctgttcattttctttctccattttattggctatatgtcttactgttttgtggatgcttattacatattatggatattgacactttttcatatatgttgcaaatatttttatccaatctgtcatttgctttttaactgttgattaactggggttttttgttttatgtaatgcttaatatttttatgtagttagatttattaatcttttccattaagagcactgaggtccaattcgggctttgaaagttattttccaacactaaagtatagaaatattttaatagttctggtattttcatgaacttgcttttataggatgtttatatctctaatccatatacatttctgtgtgtctatggtgcgtgtattctatttaaaatggcattctccacccttcctcattctgtacccattttgctgcttaattttcattgtaacacctgccactatttgccatgtggtttgttttacctgcggatttgtttgttactcatctcccctcaccagactctcagctccataagggcatagaccttttctgttttgttcactgctgaattcccagtgcccagaacaatgcccagcacatagtaggttcttaataaatatttgttgaatgaataaacagccagccagttgtcctagtgcttttatttaaataatccattctttctctgctaatctggaattccatcttcgacagccttctcttctatagtttcttctatagttattagagtctacctaggttttctccctcttcttcagttttacaatttatacttttctagaaaatcaccaacttgtaaattcattgacacagttatgtatcaaattctctttgatttttcaaaatgttcacgtatatgtttacatcacctttcttaatgattatttgcgactttgcctattactgctagtcagatttgccaccgatttgtccattttgttggtcttctcagaaagcttagcttgcagctatgtatgtatatatacatacgtatgtatatgtatgtatatatacatacgtatgtatatgtatgtatatatacatacgtatgtatatgtatgtatatatacatacgtatgtatatgtatgtatatatacatacatatacgtgcatatatgtatatatgcagctatatatgtatatatgtgtgtgtatatatatatatagttgtggttgctgtcattttctcactcgttttattttcaactttattcatttcttctagattactttggtttatttcattcttttttagtttcttgggttatgtgcttaactcatttagtttcaacctttcttaatttatcatgaaaacatctaagctttgtattttcttctagatgcagctttgattgcactactcagattttgaaaagtagggttctcaatgttgtacatttataattatcctacgatagcgttgctgtcctctttgattcaagagtttttttagaaaagcatttttaaattgtcatgtgcatcatttgtttatgtatttttattttttgctatttgttaatgtctaattttatttcatcaagaactgaggctgtggtccgtacaattcgtgcattttggaatttgagattttcttgcagtctagtacagggacatttgagaaaaaggtgttttctctatttcttgaatgtatatgaagttaaacttactaactacatcttcaaaccctttgtattcttctttggaggttacttataccaccaaatttcaaataataatgctcaagacatttcctgttctttctttacctcctccttgtgattccaagaatgtcttattttatacattttgtggttctgtgtttatgatgagagtaaaagttcgtgatttttgtatctccttggagaaatagactcttcggcaatataaaaggccccagtttagtgtatttaattaacatttttgcattttgtctgatattaatattggctttctcgcattattttcgttaccatttgcttttttccatttatttgatttccatcttttttgtcagtttgttttaagtgtgttatttccaaacagcatatagctggatttttttttccttttatccagcctggtctcttaacttaaagtaatttaatttattcatattattgtgtcttttgtcatcttattttatgtcttttgtttattacactttttctttcctgtttaatttttcttttcccactcttggctaaattaatagagttttctttgtttctcccttcccctctccccacacagtggtttaaaaggtttgcatcttgcttttcttctagaaatggttagtttttacacagatttctctattgatgtcaagaattaaatggtatctaattcccaacaagataggatcatgattatcaacatttgtttagacttcacttcacctttttctgcttttattatttctccctgtttcttggatatcctatattgtccttttttgaattacttattctggtacaattcttatttcctttgagtgattcctcgagtaattttttttttttttaagaaaagatgcgtgggtggtgggtgtcacactattttatacttctctctggctttgagacttggctgagtaacggatctaagggttttaaccctttttcctccaagctcggaggtctgccctgttgtaaatgatgcagataccaaattgaatgtcaatttgattccaagcatttttgtagagactgtcaaatgccagctccccagatatcatctacaaacttgttggtaaggcaaagctgagtttattactcacttgccgaagggagggcgctgattccagagggctttggcctgtctgggaggaaggaggcaaggttgggttttctgaagcctagcagttctctttaaggtgggtgtgtcaatgtgggggcttggttagggttgtgtaaggaacacagtagtccaggactggtggaagccatgaggtgagggattttgaggccaggcaagggattcagagaatcgtagggcaccagctgttgattgaagagtagatgggtccttcaggaggtttctgtgatgaacagtgaagccatttgccagggagagaggctcctgggataataaagtcatgcagttgaaggcagaaaggtgtgtggggaggtactttctgctcccagtacctccctgcccaactctcactttggtcattttggaaactgagaggatccactctttttgggggggatttcaggaccccactccagcccgccctgccatggaggagctctgagcaagtcctggggtgcctggcaggtgggccctcactgcccggctgggtgaggctagcttcgctctgattagatttcctgtcactccctctcgtctgttttccctcggactttctggccagctgatgctactgcagatctgttcttatttgcacatttctccttttatttgaggggtgttgcgggggggagaagagggagataaatgggctcggtttgccatctaggccctcaggtgtgtgtgaccttttctggtgacctggacacgggtgtggtgggcagccctctgacctgccacggagggggagactggggacagtcagtgacaccagcctcacgaccgcagccagaagaagtctctctccttccacctgatcctttctcctcaagccacacccctcaccctggctgcaggacctcactgatgaaaatgacctcacttcacagcaccaccacatccaggccacttcatctgtcaaaccgtcatgtcccggcccctacacagcacctcccactgtcgctgcccctcacctccagccatgtggacaccatgcaattttcttgaacattctggccatttgggggtcctctgtcctttctttttatcttttttttattcttttttttttctttgagttggagtcttgctgtgtcacccaggctggagtgcagtggcacaatcttggctcactgcaacctctgtctcttgggttcaagcaattctcctgccttaccctcccaagtacctgagactgcaggcatgtgccaccacgcctggctaatttttgtattttcagtagagacagggtttcaccatgttggccaggatggtctcgatctcttgaacccgtgatccgccaggcgtggtggctcatgcctgtaatcccagcactttgggaggccttgacaggtggatcacgaggtcaagagatctgtcttttcttacatgactccctttgttttaaatatcctctttcttttttctctctcttacacattcagacaccatcaaaattgactacccctactccgtgctccccttgaagatagagattaaatctttgccatctattaacgctggcacctacaacccggctctacccaaaataggcactgagtggacatctgttaaatgaataaacaaccaacttgggcgctaaagagaattgttccacactgactgtgtgtgacaggccatactcggggtgagggagtgagtcagaatgaccctgcctgagttgtatgcaatctagaagggctttaagccgtggctgagcacagtggatgctgttatttaccttaggaggagcacagcaaatgtgcttggggtattctggagaggcagaacttaggtccagttttatgggagctagctgaacctcctgagggaagatgggcaggattcagcaaggtgggcacgattgcagagggaggtgagtagcatcccatgcagaagaggctgcctgagccaaggctcagaggtaggaaactgtagattgtgtttgtagaatagcgtgttctgagaagtgagtgtttctacactgggaggaagagagcacggccattttgattaataactgcaatctattggagggcatgaggtcagatcagggaggatagaaacccacagagtagtgagaaattgggctggttcggacggcagaatcaggaactgattgatagagccacagagcaagcctctccactgtgtggtgctgcgatgctgccctgggggtaggagggggctggctgggtttcatagcagcaggtacattgggaaggggacagcaggggggcatcggtgacctgtatgctctgtaggaatcagcagtgcgatatggttgccaaacgtgattctgaggctgtgtgaataaaaagcagggtgcccaagaggagaaaggtaacagtgccccaggcctgtgtgcgggttactccagacccagattattgggttccactctgagataatattcagagcagttacgtgggccgtgccaggcattgttccaacctttttccatgtacggactcattaaagtacgggccctggaaggcactcaccattcttagccccacttgccaggcacagcaaggcaatgcaactttctcaagttgcagacgtcagaagtggaagggctagatttgaaccaggtatacctggccctggaagccacattctcatccatcccacgacactgcctgcagcgggcaaaccagagcatcctccaaagagcacggcgtggatatgacacgccacgccaccactgactgaaacaacttcggctttctagtttacaaagcatcttcctctatatttccttatttgatccttacaacagcctggcaagtcagttattaaaaaccaatactcatttgtgtattcattcaggaatcactgttgagctcctgccctgaaacaggcctctcttggcctgttttattttgtgatttggggaatacaatatgcttttatgtctattactgtatttcattgccacccatgcctgaatatgagtcagttttccaggctgtattagttttctcttgctgcataacaaatctcctccaatttagtgacttagaataacacccatttgttagctcacgggtctgtagggcagaagtctggtacagagtggctggattctctgctcagggctgaatcaaggtgttggtgggctgggttctcatctggaagctctggggaacattctgctttccaagctcattcaaggtgttgacaagactcagttccctacaatggtaggactgaggtcctgttttttgctggtcatcagccggggttgctgtcagctcctggaagctgcgggccaatcctttccatacaaccctccatcttcaaggcggtgagggtatgatgaagctttctccagaccctaatctctctgacttcctctcctgtgattagccagagaaaactctgctttttaaaaataatttcaacttttctattagatttggggtacatgtgcaggtttgggtatattatgtgatgctgaggtttggagtagaatgatcctgtcacccaggtagtgagcatagtacgcactaggtagtttttcagcccttgtccctccctctctctcccccacccagtagttactagtgtctgtcgttcccatctttatgtccatgtgtacccaatgtttagctcctgcttataggtgaaaacacatggcatttgattttctgtgcctgtgttaattctcttaggataatggcctccaggtgcatccatgatgctgtcaaggacatgattttgttcttttttatgactacataatattccatggtgtatatgcatcacattttctttacctcatccaccactcatgggcatgtaggttgattccatgtctttgctattgtgaatagtgctggagtgaacatacaaatgcgtgtgtctttttggcagaataacttattttcctttggttatatactcagtaatggaatttctgggtcgaatggtcgttctgtttgaagttctttgagaaatttccaaactgctttccacagtggctgagctaccttacattgctgccaaccgcgtataagcattcccttctctccacggtctcgccagcatctgttgtttttttgcctttttagtaatagacattctgactggtgtgagatggcatttcattgtggttttgatttgcatttctctgatgattagtgacgttgagcatttttttcatgtttggtggccacttgtatgtcttgttttgagaagtgtctattcgtgtcctttgcctactttttaatgggattatttggtttttgcttgttgaattgtttaagttccttatagattctgaatattagatcttcgttggatgcacagtttgtagacattttctcccattctgtaggttgtctatttactctattgatagtttcttttgctgtgcagacgctctttagtttaattaggcctacttgccaatttttgtttttgttgcaattgcttttgagcacttagccataaatacttttcccaaggctggtgaccagaatggcatttcctgcaaattctgtttttaaagggctttcataccaggccaggtcttgataatccccctctcttaaggtcagttgtgccctgtaacataacccaaccatccatcctattcacagtcctgggggctttgcagggtctgtgcaccaggggaaccggaaatcttgagggccatcttagaattctgcctaccacactagtgaagaaatagaggctcagagaagttaagtgttggatgcaaagtagggggatgtggggatcaggccctgtaccaagtaaagctgcttgggagtagttggggggtgtgtcctccagggaccaggcagggattgttctgtgtctaaaaaagttgaccaagaaagttctttgaccatgtttctcaatcatctcctgcaggattcgaggcacaaacccagcagcctcaacctagttcatggaggagcctcgcggggtcctggccaagcaagcccgcccctctggtgggaagagcggcgcctaggtggagggtggctgccgcaggagtggacatgaatgctggctttcagagagaacagcgtttcagttttggtcatcggaagtggtgccttcagcacaggtaggaaatgggggctgttgctgaatatgcttgccaggcgccatgttggtctgtcttgcatgagcttgcttagttcttcctctgaaaaatgtattattgttattattagtgttatcgttgcctttctggtgcctctgtgaaagttgttgtgaaagtcctcaaccttccttggtcaggagtagagaccttgagtgccagcaactggctactgcttcccatgctgtctcccatgaaatgcagtccgccccctcccagtacctcagtttccattctgtcctggcaaaggacacaacagctcctctcaaagggccacagccccctctccaggggccacagcctccacaagccagtccaactgtgtgctcctgatagccagaggtctaccctcttctcctacataatggttcttgctgaagaccaccactgcccacccaatgcctagtcagaggagcaccacgggagttagagacatagcagcaggtcttcagtcccctttctcaccccacctgcccccaagttgtgaagaattgaaaagatgtcagggttggggcaatgattcttggaatttcagcaatttcaatagcagggccccagctcccgaaatagtgatcaaatgagcctggggagaggcctggtatcagcttatgtttatatatgcatttagatcttcaggtatgtgctgtggtttctggctagatgttcaggcttcagtacaggttaggtgtgcagtgttagaagcttgttgggtcaagaacaagtccttggatgttttctctggtgtggagagccagaatcacccagagagctggggattagaaagagggtgcctggtatgacaaaggaaggaaggaagggagggagggagggatggacggagggagggagttctctggcctacctgtgccctctgcatcagactcttgggggttggggacccaggaatctacattgattctgatgcagccaaggcttggggactccagggcctccttctgggggcctgtgtttgggtctgtgggcccagctgagatttccaaggcaacatttcccagcctggcatgccaggagcagtgactctttcgcttctctgaaagctgaagtttcctcactgtatagagaaggggatggggccacaggcagccctcagagatggcatcgctgttgctgcctggacttcggggtggctagagcctgtgtctctgcccacagtatgacagcttgggcctaccagccctaggcctagaccagggttctcctgaggaggtaaaggaatcgttccctggattccaaggaagaactgggcattggagcctcattttaagaggggatgtttgttgtggtacttaacagtgtagacccaccctgagttcaaatcccagccccgactcttagtggttgtgtgaggcacttactggtttaagaggcaaattgctccaactctgcctcatccttctcacttgcaaaatgaggctggtagtgatacctgcctcgcagggttgctggggaaggcccctagaatgttgccagccacgttaacaaggacctcccaaacgtgagtcacccttctggcgtgtgtgggcagttgggccaccaccctgctctcccagttgcagccctgtgccatctgcatgccctgccctctggccccagtgctgtgtccctgaggtcaggctgaagcacggggaccgatgctgctgcccacatggttggtactttacagacaggttcgagtccttcccaaacctcagtgagtctggtcctgttgcccctgttgtgcacataaggaaactgagcacagagaggttcagtagtttaaagacagctacacagatggtaaggggcagagcctctggttacaaaagacccagcacttttttctccaccaagatgcttcctgaagaagagcaatgacagctccaaggatgaccccttccccaggaatgtccacatgttcataggaatcgatcatgctgtaatgccccagcatgcccctggctcggcatcctggggcacttcctggtacctcaacttagcacttgtttccttctgtgcctatcacagccatttaggggtctcatgagcagtctcaggacaggatctgggttcattccatgaggtgtacaacagatacttgaactagtccagaagcagagccctctgagagatgcaagccagatacatgggggaactgtccagggagtacagatggggggtcctctgcagacttggcatttccctcccctccccccgcttcgtgcccagactctttgtttgtccgtgtgggctcagccagctgcttggaagaatctgtagagtatgggacttgcccagagggaaatgagctgtcagttccagcgagaaacctggctcctgcctctgcctgtgttctccctggggaagaaagtgcctgtgattaatgaggtgctgacttggtgctgctggagtccaggtgatcacggccactgctggcacggccctcccagccaccagggaggagctgggatatatggcatccgaacaagacagaggtgtgcagtgctgcaaacgccccggtgctggggagggcggggtggcccatcagcaccatcagaggcttgggcacagctatgtgtggaattactgagggcagggaaacatggagtcacagccgctcttcagaaggggcctgaagtggggctttctccagaataaatgtgctttctgaatgagaagctagaggacagatctcatttgaaaatggatatggaagcaatttctcagcaatgagaaacttgagcagttttcaaacttttatagtcttagaagctatttttaaaagccaaatcttgcatggaatgtcaatatataaaacaggttaaaatgatggtttatgaatacattattttttaagttcaaatttttaacattgtttaaaaattctcatttttattcttatttcttatctccaaattattgccatttagacttagtctaatttaagtcagatgcaaaagactttatttatttatttttgatatatactgtcttgctctgttgcccaggctagagtatagtggtgtgatcatagctcactgcagcctcaaactcctgggctcaagggatcctcctatctcagcttcctgagtagctaggagtacaggcatggaccaccacacctggctgtctagtttttgacatttatttattatttattatgaacgttatatttattatgttattagcgacacctctgttttgatgcacaaacacattgaaatctgaggttctagatcaggaattggcaaacttgcctgtgggcctaatccaggctgctgcctgattcggtaaagttttattggaacatagccacaccgttttttaaatgcattatctatggctgcttgagactgtctgtttcacaaaatctaaagttcttactatttggccctttacagaagaagtttgctgacctctgccctagatcatcattgtattgcttgctttatcagctgcaatatctaatattcctttttctttcttgtttcgtttggcttgactgcaaagtattaaggaattcttttttttttttttttttttttttttttttgagttggaatctcgctctgtcagccaggctggagtgcaatggcatgatcttggctcactgcaatctctgcctcccaggttcaagctattttcctgcctcagcctcccaaatagctgggcttacaggcgcatgccaccacaccagctaatttttgtatttttattagagatggggtttcaccatgtcagccaggctggtctcaaactcctgaccttgtgatccatccacctcggcctcccaaagtgctgggattacaggcgtgagccaccgcgcctggccaaggaattctaaatcaacatccataacatgatgtgaatggtgacagattgttaacagcttgccttaaagccacagaatggtcttcagttcaacattatctgggcatttggggaggagtagaagggaattctggtttgcatcagtgacaatatccaacaactgcttgaattccttcctattacacacataagtcagacaggaagccccacaatcatttatgatattttcatgataatccacataatacattgtcttgtcattgaaagcttcagagtgtacttgcttgtatggttttgtgtacgcatatagagtcctgaatttaaaaaatgacaacacaaagatacccagtgaagagctccactcttcctaactgaagatacatttcaacggtgaaggtcaagatctacccagaccttcatctgaggtctgcacaaaccaaattaaaccggcagcacttgttggctatattcagtgtgttcccatgtgctatagagcatgtttgaatgtgtgtacgtgctcgttttctgttagaataggagtcaaactgtacttttagaataacatgctcgtggaacatttggagagcctctgaaacactttcatggaacacaatttggagactaccccttcagcaaatattggtggttctcatttttgtactggaggataatggaggggccacggatgctgagagttggaggcagaggaggaaggaggagagatggggaggggagaagttgaggtgatgctgtggagagtgcagtcagtagtggaaatagtactcttcgcaacccagggaggccatgtgagcttctgccgaggcttgggatgtctcctagcagttgttgatgggcaaactcagctcctggggctgctttaatgacctctggcccgcgcctttgaagaaaaggtgcagaagagcgtggagcaaggtaaacatgtgtgcagagaagtgggggtggggagcatacacgtcacttctgatcggcatgcagagagcctctgtggccattcaacaggtcaaggtgtgaggcagtggggaggaaaaaggatacccgaggggccaggagaatcagcttgccaaaccagggctggcacaggaggaggagggcctggagcatgggccgtgtttgtgagagaccggcgtggggttggatgtcaggttccctggatggtggtggctgggattgcacattggccttaggcatttgaggcaaagcccacagacccaggaatgaaacccaggagtcctgactcccaggccacctgcccttcactcagtgggtgcaaggaagagagccaggcctggtggtttttggaggccatgggctagagaagcctcaaggggatagaaaaacccctgtgctttctgaggttgtgctgctcaccccatagaaaagggacatttttaggttttaaaaggatgacctcatttttttcttatttacatagccctgtttgtttatatagccctttaaaaatagcaagtgtgtgctaagcttagtgctctctctcccaccaccagtggcagagccactgtgtggggagaaacacctttttatcttggagaggggcagccttgtttctgaggacagatgggagcaaaacgggacaggtaggaagtttcgtggtttctcgtgtcgcttctccaaaatagccacactgctgcctcccacttcctgcctgactcggctggggtagattttctcctttagaggatttgtgttctgtgtattcccagggaggctcgaagggatctgttgccaaaaacatgcttgacactgaagccctggagcttggcactgagggccccagctcaggtttggaccactgggtttgcatccgggctctgtctcatactggctgcgtgaccttgggcaaatgacttcacttctctgtgcctcatcagtaggatggagataacaactctagctatatccagcagttactctgcagattaaatgaatatgtgtaaagggcacagcccagtgtgggcacatagcaactcttaatgaatctcttaataaaaaacagcaatgttgttgttgatctccatcccctacctggaaaactgtaccagcctcccagccaccttccctttcccctggcttgcctgctccagcacatcccagcatgatccgagagtgatagaaacgtgaaacacaaatctgaccctgctatctgctgcttaaaatccacccatagcttccaacgtctatggcaggaatgagcattcttttgctctgaatggccagatagtatttgaagctttgccgggcatatagtctctcttgactttgtcattgcagcctggaagcaaccacagataatatgtaaaaaatgggcgtggttgtgttccagtaaaattttatgtacgaaaacaggcagccggctggatttgccaacccttgacctacaggatgaatccagacccttagctcagcattcccagtccagcctgttcccgttatctccatccttcttcctcccccacccctgctcttgtgcagaacatgtcacactttaatcctttgcgtgtgctgctccctctttctgagttttccttccctgccccctgagtgccccttccccatggcattaggacctttactctgggattctgtggtaccctgtctttatttctaccctggtcatatatgcaagttccatctgtctctccatgagaggggctcccctctaggcagggattcggccttcctcttctgtacacccagcagggtgctgctgtataggtttctgcaggtgctcagtaagcatttgttattgaacccaaggatctgcaagatggatggttggcctcagggagctcacagtcagcttagaaagctaggatatgagccagtcaaaagccagccagcaatccaggcaggaaatgatgatggtctgtgtgtttggccctaactgatgtcaagtggagattctgagcttgatagaggaaggtgaaggcatttgagttggatgttgcagggtgggaaagagacttgcagagatagggaggtcaggaagtctttccaagttggggaagtcataagagaagagcagggctgaccaggcctgggggcttaggcctgtaatcccagctacttgggaggctgaggcaggaggatcacctgagccggagagtttgagactagaatgggcaaggtagtgagacctcatctcaaaaactagaaaaataaaaaatttagccagatgtggtggtcatactcctgtagtcctaaatattgagactgaagcgggtggatggcttgagcccaggagacggaggctgcagtgagctgtgattataccactgcactgcagcctgagggacacagcaagaccctgtctcgaaaaacaaaacaaaacaaaagaagaagaagagcaggctcattgctgagctcagggtggggagtggacagagcagtctggccacggctgcaggccctcccttgggagacagagggggccaatgctggaaagcagggcgaagttttcatcaatgagttgggggtggtgaggaagcttagactttatcctgtgagccagaatttctccatgtgtgtccacataccctcccataacagaattaccttgagtttctttaaaatgcagattccagggctctgtcccatactgggggccaggaggctgaagggggtcaaggccgtggtctgtgggaggaagaggctgcaccatggctatgggtgcaccacaagtattattcagactggtgtcacctgtaggaagccgggtgatgcctttcccagctggactggggacaggtgaggcgggaatgaataatcctcccaaagggcaattgggaacacccaagctcaaacgtggcaagtgacttgcccagggtcacactgtcaattacttgcaggtgtggggctgaccagttatggaacaggcttcctctcccaatctcagggcctcgggtggtcctggaggtgccgcaggtggaagaagaacaggccaaggcaaatgcctccggtacccagcactgcctggtgcacagtagtggttgatcagtaattgttgaaccaatcagggtttctgtttgcttgaaggaaagggtaggagtggagggtgagtgactgggtgaatgggtgctatgaggacaaaggagagtggagtttagaggtagcactagtgtcgcaagcctgaaggtttaccagagacagaggggtgaaaagatgagtggggcactaagcatattgaatgtgagagctgctggaaatgcaggattggggcgtgctgggcggggcaggtgatgtgtgcagctgtggaagctgctaccaagtcaaggtgagcagtgcagagagagaaaagcaggggattagagaccaaagcttgaggactgagtacaggcatctaggaagaaaaagcttggatggaagagtcagagaagtgctcagacaggtgagaggagaggtagggcaggacaggaggatcagaaaagggagatttgaacagccaaatcacctaggccacttagtttgggctgctctttagaataaagccagctatcctaaaagaaactatgtcatgggtaaataaaaatgtcaatcaaactaaaactgaaatcacgagaaaaaatttctgtttgcttgaggtttgtgctcctggccagcgtagctgcaggtgtgggaaagcgagtggaaactggacccacctgtgccacctgtcaggacaagccctgctgtcttgcctctgttcgggctctgtttggcatgcctccctggggtcgtttcagtgctcccaagcctttgtcctcttctcctgtgtctgccttagcacctttccccctttccttccatttcttttattcattcaacagatattcaaaggaactcagctgcagcccccaaacccctgcagagcctgtgagtcacccactagagagcttgaaacatggagatggagattcctagacgtgcaaattcaggatgcctaaaagcagggagtggccagccatgcctaggtgctcactgcagcctaatctgagcagcctctctggggctacctctgcgaatttcctattttggagctgctctaccggggctggttggggttgggggactgaggcccaggtgtctgggtgtttattccatatggctccaaaaatatagcattcggacagcctcccagctgacctccctggagccctggctctccctctgctgagcctacatatgccaccaaactcatcccttcccccactcctaacacccataccagtcaggtgacaccccagccaccatcaccatcctcatccatcctcaaagaggtaggtcatccttaccttcggccctacttagacataaggggccaagcaccattctgggtgacaaagcacaaaacacctgcctcttggagttacattctggtagggaaatagacaaacatattgtcactacacacacatgcacactctctatagactgtatattttgtgagatcttaaaaacataagtgtatgtaaaataaatgtaaatatattatcttcttaagtaacatacatagtatgtgacaaggtggcagtcaggaaaggaatagggggcacggggctggcaggttgtcaaggttttgaaatcaggcagtcaggacgggtggagagtaaagacctgagggaggcgaggagcaagtgctgggggtatcagaaaagagtattccaggcggaggcaagatcagcctgctgggaacagcaaggaagctggtgtggctggaggagtgggggtgggggcacaggagcagaggaggctggaagggagaggcaggcacaacatccagaagccctgggaggcctgagcagaggagtgggctgtcctgccgaaggaggctgtggaggctgccctggagggggcgggggcagcagcccgaggccagctaggaggcagtgacgtgacagatcaggaggtgatagagtcacacaccagggtggcaactgcgggggccatgggaaggggtctgattccagctccattttgaggtcaagccaacatgatttgctgacagatgggacgtgaggtataagagaaagagttctgagaggggagccaggctgacacatctgttcagtcttctctcagactagtcaacttcttcaagcctcagtttcctcatctggaaaatgggccaggtggatagataacttccaaggtcccttttgtcttgggaaactcatccttgagctcaggtcactggggcctggggtggtcagggaaggctttgaacaagtgagtagaactcgggcttaagaaaggacttagaccagacaccaccgaaagggaaagaacgggacaggggcacccaggcaaagggttgcaaggcctatgagtggtgcccgaggatggcaggcagacgctgctgtcagagcactgggcctcggtaggaggctgccaggagccacaaggatgggcacaccagctcctcaacactacgccctttggaataaaccagcaggttcagggcccgagcacattttgcaaacactgaggccctcaattttcagcattttcagatggacatgcttaggcaggaaggaacaaggcttggctcctggcctggggagagttaacctcctggcccggcattgcataaccgcagagtctgctgagcgcaaggagactcttctgtgtggcagccagagtggcaagcctggtggctccgggctctggcaccgtcccgcagcggaacaaacagccctcccttcccagataatggccctcattgagcattgtgtccatggccagcacccagcacagggcagctcagcctgggtaagtttcctctcttggctgcttagcaaaatatttacactacgcctttctagtaagatggttcctaggaaccagcaggcagagagagctggggaaatgcacccaccagtgaccctggtctcagcttagggaaatgctgccacacacccaatgacatgtgagcctggtgcggtcattgccctccagggctcttttgtaaaagaagacactgaactaaaagatgcttagaagcctgtccagttccaaagccattggcatcttctctaattaaagagtgaactccagtttcttatgatgtgggagtagaatttggctggtctttaatatctcacaaagggtctctttctcaggaaggcatgtgtgtgatttgggagaggtgaagatgagaagtctgaatcctacctacttggttctctcccgtgcatcatggatgtcaggaaacactgttgatatctcctgtgcactgtcaatgtccctctctgtgtgtctttgaatggggagcaaggggcataagccagatcaccccaggcggtgccgcactttaagaggtatctggaccagccctcaggagcatgcagcccttgtcagaggaacttttgaagaaactgggtaacagaatacttgagagacagacttgctgtcctcaaccaccccaggggttgtctggagaaaaagggtcagagatgttctgtgtggtcctcgggacagaatcaaaaccagtgagtgaaaatgacatggctcattattaggacgatggcccaaacaataggccccataggtattttaaccaaaaacacacacattgatccatgtttccacttctggaaatccggcctatggaacaatgaatgcatcagtctgtaaagatatgtgtataaaggatgtttatggcaaaattctagtaggaaaacttacaaaaaatatacaaacttaacagtaaatttaaaggtattccatccaaaccatggtccatcattcagctgtaacaagattgagacagatcctgtctctgtttggaaaggcagtacggtagagtggttaggagcacagggtctgaagacagacagccagggttcaaatccggatcccaccacttacaaactgtgttgcttgaccctctggccattcacactcctctttggtaaagtagggattgcaatagtgcctgtcctttaagcttgttaggagcagtaactgagttaattatgtgaggtgcttataactgtgcctggtacaggataactgctcacaacctattggcctgtagcctagaaagactgtccatgaggaaggccgagtgctgaggaatgtacatagggtgataccatttttagaaaaacaaaaattgagcaggtgcagtagcacaagcctgtaatctgagatactcaagatgctgaggcgggaggatcatttgaggccaggaatttgagaccagcctgggcaacatagtgagactccatctcaaaaaaaaaaaaaaaaaggctccccatcttccccacttcctataccctgtttgaaaaaaaaaaaaaaaagtaattgctattgcctcaggcagtgagtggcctcctgagagcagcctctaaggaaggctggagtctcaaatgggagcttgggtcagtgtccttggcagtcccttcaacccggagactctgagactctgtgcgtccctcttagaaatctcaaagtacatcctaccctgcctttaactgaacgggatagtctgctgtttgcaaaaatatacatgccaagacacgtcctttgtgcaggtggggaacaaagatgttggctgggggcttaattctacagcactgcccattgccctgctgtggcattcatcagtggagcccacatggttccacttggggtgctctaagtttcctcctagacccatgggtttgtatgagccatgccaaccatgacaccatgacctgtctgaaatggactccaccttggtcaggtacaatgatgctcagatccacccaccacatgtcacaggctttgggagtggagggagaggtgacagaagctccccacctggggcatgtctcttgtggaaatcagtcatttcttctcccctttggttaaaccacttgagatgcggtagagagtgtcatcttagcagagagaaaacacacttgttaaaggagtcttggagttattaatatatttaacaaatataaaatattttcaaaatatttcatccaagcagcaatattatgcatgataatataacactagtgaactcaccaccctgctaaaaaaaaaaaaaaaaaaaaaaaaaaaaaagacttgtcaaatacagtggaagccctgcatcgcttccacaatgtgggtccctttctcctgtgctcccaggagtgaccgtcatcctgaactcgggattaccatcccatgattgttttctgggtttaccctgcccccaccgggcttgccctgagttgggtgaggccctgtgcctctctgcccacagtcttttcctgttagactcttttggtgagtttcagcctttggttacatctaaatgtccaccggccctgccactgtttctgggcagtcttggtgcctgtcctgtcactggccttgtggtcttgcgcgaatcccttctcttccttgggcccagcatcttcacctgtcaaacgtggactttagaccccacttaagcgccctctagctctaagcttgcgtggtgtgatggggaagccaggctgagggttctccaggtggaggagatggggggcagccccagtgcatcccaaggtgagggacgggccgatttcccaagttcaggacataaaccatgagtagaagatgagctgattttgggagaacatgctggaagttctttaattgactggtaaaattatttatttaattcagtaaaaaatactagttggcagtttctcctgtggtccctattgcttaggaagaagtaacctttaaacaagtccaattcaagtcaaagtaaattaaactattacataaatagcaatacaatacgatggcattatttctgagaaaacttgtaacggtggtcaccaaatggcacaacgtttcccaaacaggagctaatgacttaaagggtggggcccacctggccttctgagatgctgggagagccaattgcctagctcagagctggatgtcagagccccggaagtattgggaggatgacttcatggagggctccctacttaaaacagcatggaagaaatttccttcagatcttagtgccaagaagagctttgttttttctgaggaactggccagcgtatcatcagaacacggagactgtgcagctaactgtgttgcccttcttcctctgactgctgtatactaaatccatggccccaagagagctaccatgtggggccttctaagtgacttacccatcttcttccatcccttctggtctttcatttcccctgggttgatttttcattttaaatttgtgttcctattttgtttttgtaaattacctcaaatctactgtggaataaatcaagttaaaattgcaaaaagacaaaaaggggattaactaatgagttaatctatctgtgcacaaactgtacatgaccaaagcatgcttggctctgctcagcctgttgggacttcctacgaggaactgaagccctgcagaaaggaggcttgccttaggcagaaagggtggcaaagcagttgggatggccactgcctgttttccacccctagaatggaaccatctaagcccttgggacttgcaccctctgttgagctttgagatcatctcagaaatggtactctccctgcagactcagagcctttagactcagggctggtggcccttgacacgcctctctcaccaccagataattatattttcaggcagctgttccttggggaggaatattgagtgccgtcccatgtgccatctgtttctgaccattctgattctgctgctgacctcagactgcccatgttgtggctacctctcccatctgagtccctgcactgcccagtcacagacatctgctgccggacgccacactgccctgatggctcagagcggccagctccaacctgcgtgatctcacaggcattgtggcctgggcgtcagggtgctgtgagaaacaccaggaaacactgatatttttagtgcaaatgatgaaaaacgttatgctaagtgaaagaagccagacacaaaaggacatatggcgggtgattccatttttatgaaatgtccagataaggcaaatttatagagatggaaactagatgaattagtggctgccaggggctggagggaagggaatgtggagtgattgctaatgggtacaggatttcttttcagagtgatacatgtgttctggaattacatcattgggatggttgcacaaccctgtgaattttatggtatgtgaattgtatctcaatatttgaataatcaaatgactagacagcatttaaagagttatgtttatgagaaagatactcaaagtttacacaattctactcattagcaaattaatacaccccttttttcagaaggaattaaagtgacttcctcaaactattaactgaagctttccacaattttaactttgttcattcatttatttatttattcactcacaaatacccatgagtgcctactatgtggcaggcacagagaacatgaaggtgtttaaaatacagcccctgctctccaaaatgtgtagctggggagatgggcatgtgaaaagattagtaccgtgagggaatacaatataaaatgtcacgagacccgccccacgcgttccaaagtaagcagtcaagaattgacaactgtcattgcctctggagaggggagctgtgagtggcctgggctggaaggcaggggtgtgttcctgttctggaaagaaatcattcactcaggccaaagcctattgggaaacccatttggagaggacgcagcttgtcagaagggtttggagctcttgggaatggagggagtgtccctgcaggcagtgagcccctagcggctgactccgcgcccagtgctcctggctgtcctccactgctccctgcccagggaatcctctgccctgtccaggtcccttggagcttccttgggcgcttcctggaaggaggtgctgcattcaccctgccagggccaggttgggacaatgagaggcagagactgccccatttctgtgtggcaaacaagaaacatggtttatcggttcttctgaggcttcagttgtacctcagaccctaaagggcccagctctgcccatctcttccatgcaaagatgaagggaggggacaggggctggcactgtggtaccctgaaggaggcacttaggacggtgatgattctaggccctgatgaattcattttttaagccagcaaaccctcctggtcccctgagttcaggataccgtatttgtccaagcaaaggatagctcaggaatacagaaatgagtctgatcctaggcaggactcagggaacaccatgaatccttgagaaccatgggacggagaatcagagtcctgagctgtggatccagcccagccactttccacctctctgaacctctgtttcctcatctgcaaaacgaagtgataagccccttcccagagggctgttttgaggaaattcttagttatgaagtatgttagacattgtgtttgcagtcttagggggcagttggagccatgaacaggaggtctgcaaggaggaacttgggtgaaattaaatgagacagtggctacaggggcctttggtgagctgtagtcactgcactaacgtaaggcggcattgttgggattatgatccatctgaaacaggggtgtaaacaccggccaggggaaggcagaatgggttctgtctgagatggaaagaggtcccagggagaaactggcagtggtgacaagaaggatttggctgaacaaagaagggaagatgggggaccgggcagcaggccaagggaggggcttgaaccctggcaggaggcagaaagggtgagaggagctggggcacaggtgggtgggagtgggaggaggaaggtggggaggcgggaggagtggaggtgggatcacagggtggaatagccagactgccaggcaggaaggtgaggtgaggttgggtcctgtagaaaaagcctgggccatcaagaagggcgagtttatatcttcacagacctagtcaggaggttcatctggggccagaatcaggtgctctggggtgagccgacctcaggcaaccggagttcccaggctagggagaagcatccagaatgtcagggcgggaaaggtccccgaaacccaactctagtgaataccatatttttccgatatggaatcaggcagcacaatctcacagaggacttgcctggttgcccaggacagtgggagaaagccaggtgggtctctagatccccaggcctgaacaacattcgagttttcccttgcttccttgattaaaggctgctagagccacatgtggaggtgaaatggggaagtggttgagacacacactgcagaccccctgcctgccttggcttgcagtctcactctttgttgaatgtgtgcccctgggcgcatgatggaaccttcggtgcctttgtgtcctcatctgtgagatggatgtaaaaacattgccggcctgataggctcgttctgaggactgaggacatgtcaggttctcggcagagagcctggcacatggcgctctgtccccatcagcatttcttatgattgattatcccagttgctccacagtttgtgtctttgttacgagatggaatttgccttccttaaaccacctttggtttaaggaagtccctttgcccgtgtatagcttatcttctggctcttctcctgtttcctcaattaaatgttcttgacttgagcctgggttacgttatcatccattcaacttagcgtttgtttattcatccattcactcattcatttgctcataattccctggacaacccgtgacctttgtttagaacaggagtgtaacatacactagtaattttctcaaagggtcacccttctgcccccacaccctgagcctacggccttctttctcacagtgtgggattttcagagttcacctggttgaatggaagaaagcctgtatgaactgcaagagcttattttttggaaatgcagccccacgaaatcatacttgacaacatcgtcttgttcagggagcacagagtgggagcttggggggtctcagggcaagtttaagaaggctgaggatgatgactgctcccctcaggcacacaaacagtacattccctgagtgcttttgagagctcagatgttgtcaaaaaaggaagatctggaggtcagatcaggacctagagtgcgaatgcctcacaagaaattgcgctcggaattcagtaagtatttattgaattaaaccgggctccctgggtggagctggagaagctggacaggtggtaccatggcctgtggggtcctctcctcaccagagctgaagaaggctgtgggccactgccccaccagtgactgatattcaggagcagtgctgttagcctgctttgcaggaaccgtccctctctggcctgtcttaccagatgcctttcaagaggctcaatgggaatgcccctcccaccatccagtaggattcccctaggccatcagcctcagtactctcttgttctcacaaattcacccacctagggatgtaatggtgaatgagactggctccttggcctaaaagaaccctgtcctgtaggaggagaaaagcttgtaaacaaatacattaccacaaggtgtaagacatgtgatagcagcaaagtgtctaaggtacagaggtgactggctgagtgtaagggggccatagaaagctcgctgaaggatttgatgtctgaagttgtgtattagggttctccagagaaacagaaccaattgtgtatgtgtgtggtgtgtgtgtgtatacagagagagagattttaaggaattggctcatgcagttgtggaggcttttcaagtccaaaatctgcaggatgggccagcaggctggagatccaggaaggaggagccaaggctaaaggtagtctgcagacatcattcccctgtcctctggggagggcactctttttctgttaaggcgttcaaccgagtggatgaggctcactcatattgtggaaagcggtctgctttactcagagtttaccaattcaaatgttaatcttgtctaaaaaatgccttcacagaaacatctagaataatgtttgaccaagcgtcttggcctatggcatagccaacttgacacaaaattaaccatcactggtgggtttaaaggacattgaggagtttgccacatgtctaggagggaaagggcatttcagccattgggaacggcgtgtgttctgagaattctccagctccatgtggctggaacacacagatggagggaatgagagaggtgaggcctccagagccatgccgtggggcctaaactagtggggaggctgaagggtcttaaaaaggggtgtcattatggattggagacagcctttgagcaaccttagaggatggggtggaaccctttctcctggtacacttagtgtagatagctcgctgaatctcagctgtggtagctgacagtgtacagggactttgctgattatccacctccaaaggcaaacacagcctgccaggtgcctacacggaggcttgcacgcccttaggcagtcgggtcattgactggtgtccatgaactactaggctgcccaggcaaacagggctggctgttcctaccctcagtggaactaggtgggcattgtgcatcggtgggggcccaggttcaggaacatcagaagtgttccccctaagggcagacaccatggagttctgagatgatgccctgcatgggaagggttcatcttcctttccggtgtccacatcctggaagggacattggcctcagccaatgagtcatgaatgcattgatttcctaagtcctggagcacaagtgcccacctccacctcttccctaggaattggtatgatgacagtgaaaaccgttttttttttttattgagacggagtttcactcttgttgcccaggctcactgcaacctccacctcctaggttcaagggattctcctgcctcaaccttccaagtaactgggattacaggcatgcaccaccacacctggctattttttttttttttttttggtatttttagtagagacagggtttcaccatgtggtcaggctggtcccaaactcctgacctcaagtgatccacccgccttggcctcccaaagtgctgggattacaggtgtgagccaccgtgcccagctgaaagccatttttgaaaggatgacatcataacagcattagaaaacaagataggaagtcatccgtgggacggaaacattcctaaatcttaggaagatagaaagcccatgagattgcacagacagagcaatcagagcagaaaacattgcagcccaggattccagaagtctcagtgatttttgtctcagaagagccaagcatagttcaagctgagagccaacaaagcacagaaaaggaatgggttagcagtgttctcccctgagagcccttcagaagagcaagtacagttggacccctccccgccttcttcacaaagaggcaggcagccagtggccgccaaattccccaacaaatgctctctaaggaaagtctgagacagcagctgagcaagggcattccagacctctctagcagactggatgtggggcagggagccagaagaaggattggcagctccgtctcagggtgaagtatagcattatgcccaccatggagaaaagtccttcttttggcaattgtgggagttccctggccacttcctgtccacggttattactgggagacttgccacactgcttcaccctcctgcagggaacctttccatgactgccaccctcacattcaagactgaactggtcagagaaatagacgagacacctcacgggaagccctatgtagttagtattccacttatatcttttttctcttcttctgtagtgatggaaattttagcagggcacacagccactcagctaaacactacactgcctcaccctcctagcagctaggagtggccatgggctcgtgtgagctgaaatgacaagtgcaactcccagctctgccctcccctttatcgttcccactgagtagggtgtggatgtgatggtgggagatggaagtcatgtgctgtggatatcagaagaccaagatcaaagatgtccacacggtgaagccaccatatcagccatggccacttaaactcagattgcacataagacagaaataaactgtctcgtctaagccactcctgcagttaggtccttgttataggagctagaacctgtatcctaatacatatcctaactttacaacataatccctcattcataaatatattggataaccaaaatcaccaaacattggaagcaaaccaatagaatgaaagagaaggcctaaaatggaaaaaagaaaaaaaaaaggaagagcttatttcaaaggaaacagtttgaatataagaaagcccaaaactaaattatcagtagtatccttaacagtaagtaagaggttctttcattcacctctgtaagtgaaataacctataatatcagaggagcaggttgctatgaagatagcacaattggaggaaaggaaatacttgctgaaattgtaaaatatcattatggaaaaaacttcagtggaaaaactgaataacacaatggatatgcatgaagaccagattggtcatttcaatgttaaaaccaagaaaacctcccagaaagcagagcaaagtctcaagaagaaaacattaagacccatggaggatagatccagaggttcagtatccatcaactaggagatctagaactagaagccacagacagtcagggggtgggtagaaatagtgaaagatatagccaaagaaatttcctctcagttgagaaatacacacggccaggcttggtggctcacacctataatccagcactttgagaggctgaggtgggaggattgcctaagcccaggagttcaagaccacactgagcaatatggtgagaccccatttcaatttaaaaataaaaataaaaaaaaaagaaacacacacagattttaaactagaaagatcatactgactttagggcaggaattagtaaaatgagcatgcagacccatcttggtgaaatttcagaacatcaaggataaaaaacaaaaaacttccagagagactcaaaaattacctcagaatttctcaccagtcatgcaagatgctccagtacagtggagtactttcacaattctggaggataaactaagagtcatcctgtcaaactttgaaaaaaatagttttttaaatgtgtaagattcagaaagtttgtcactcagtcacctatattttctggaagaaaataaaacctcctggagttatttcatcaatcaaaaaaggaacccaaaataattattaaatgaggttcaagaagaagtgaaggaagctatccatttttcttcttgtgaccaagtttcagtaacgtggaaccacttgcctttctcatgggtccattcatactgagtggcttcgcaggcaatgatatcttcataatgatgttgttaactagcttcactttttagaattatcctatagagtagacttaattatactgtcgatgagaatgtaattgttatgcaaaagcaataacatataacaaaaatctgaaggtgggcaggagggaaggaagtggaaagtagagaatgtggacaaattttattgctcatagtaggaagtgaatagacactgtctaaagttgatagatcagaaaatcgcaatttaagtatattacttgaagatgctaaaagcaactgccagaaccaccaaaaattggtaaccaccaaaaattgtgagatggggtggaaggaaattgggagagagaggttgaatgcgaaaaactctgcagtttcacagcagagagtcagtaccataaccaagtgaggacggtttggcattctggggcctagaagacatcagattttagagagattaataatttgagaagaaatggactttgtaaccacaccagtactacatctcttcattcagtacttgctgccatcctaacacatctgtcctaccattccagacatcagatgtatcatgaccgtgagaaggttcatttgttcactcaaaaaatgtttatggggaatttatttaaataaacaaatctgaaagctgatttgattcatgccctcagccccaccccccactactatgctctgcacacccaacactctaaccacactggaccttctcacacacttagggtttccccagcatctttctgtctttctcccactcatccccttttctgctcggtgagatcctgttcatccttcagagcccagtgtgtgtatctctaaagcctacgctggtgagccgtccctccccacccccaggagtcagcctctcccaacctgtactgggaacctgtttctatcatggcatctaccaccccttattatctttttggttcttttttctctttccctataagctttgtatttttcaggtgtaaagcccatgtcttttcaaaaattgaggtataacatacatacagttatgtacacaaaccagaagtgtaccgctgtactggaatagttttctttttaacatatgtatgtgtgtgtgtgtgtgtgtgtgtgtgtgtgtgcgcgtgtgcgtgtgtgtatgtaatatctatgtaaccacatcaagatgtggaacaattgtacacccagaaaactgcttcatgccccttcggagtaaatacccacctgccccattagaaatcagaaaccactatcctgatttcttttctttcttccttcctttccttcctttcctcccttcccttcccttccctcccctcccctcccctcccctctccacccctccgcttcccttcccttcccttccctttctctttttttttttttttattggagacagagtctcattctgtcacccagactggagtgctgtggcgtgatctcagctcactacagcctctacctcctgggatcaagcgatcctcccacctccacctcccaagtagctaggaccacaggtgtgcaccaccacactcagctaattttatttattttttgtagagatgaggtctccctacattgcccaagctggtctcgaattcctgggctcaagcagttcactcacctcggcctcccaaaatgctgagattataggcatgagccactgtgcctgggctatcctattttctaataccataagattggtttttcgcctatcctttaactttaattaagtggaatcatatagtatgtcttaggctgctagtacagaatactaaagctgggtaatctataaagtaaagaaatttatttctcacagttctggagcctgggaagtctaagatcagggtgctgacatatggtgtctggtgagggccttcttgctgcattcttacatggtgagaggtaccagggcaagtgagatgaagtctcctcagcaagcacttttatgagacacctaatcccattcactagggaggaatcttcacagcctaatcacctcttaatactatcacgttgacaatacctgaattgtggagtttccacattcacatcatcacacggcatatagtctattgtgtctgaattcctttacttattattatatctgtaagatatatatttttgtctgtagcagtactttgttcttttttattactatgtataattgttatatgaatataccacaatttatttatccattctatttgttgctggcatttgagctgtttccagtttttttggctatcatgaatagatctgctatgaaaattcttctttgtgttttttggaggacatacataggcatttctataggatatagtcttaggagtggaatttctgggtctgagggtaggtgtgtggcattagtctttgccaatcaattgtccaaatgtgtctatttaccttcccactaacaatgcacaagaagagttccagttgtaccacatccttgccaacacttggcgtcattttgtttgcttcatgttagctgttatggtgaatgtgttgtagatttaattaacatttccctaatgacaaaattgtattgagcattgttttatatgcttcaatacctcacttttaataacggatagaatatcaacacagaagatcaacagagaagcaaatgactcgaacaacactatagaccaaatggacctaacaaataaatgccaaaaaattccaccaaatagcagcagaatacacattcttttcaagcacacatggatttttctccatgttaagttacaacacaagtcttaacaaatttaagattgaaagcataccaaatatatattctgatcacaatgggatgaaactagaaatcaatagcaggccaggcacagtggctcacacctgtaatcccagcactttgggaggccaaggtggatggatcacttgaggtcaggagttcaagaccagcttggccaacatggtgaaaccccgtttccactaaaaatacaaaaattagatgggcatggtggcaggtgcctgtaatcccagctgctgaggaggctgaggcaggagaatcgcttgaacctggtaggcagaggttgcagtgagctgagatcacaccactgctctccagcctgggtgacagtgagactccatctaaaaaaataaataggccaggcacggtggctcacgactgtaatcccagcgctttgggaggccgaggtgggtggatcacctgaggtcagcagttcgagaccagcctggccaacatggtgaaaccacatcgctactaaagattcaaaaaagtagctgagcatgacagtgcgtgcctgtaatcccagctattcaggaggctggggcaggagaattgcttgaacccgggaggtggaggttgcagtgagcagagatcgcgccgctacactgcagcctgggtgacagggcgagactcagtctcaaaaaataaaaaataaaaataaataaataaatagaaatggaaatcaacagcagaaggaaattgaaaattcaaaaatatgtggaaattaaatgacacactgtaaacaaccattgggtcaaagaagaaatcaaaaaagaaattagaaaatacctcaagagaaatgaaaacaaaaacacaacataccaaaacttataggattcagcaaaacctgtactcagagagttcgttgtgataaatgcctacattaaaatagaagaaagatctcaaataagcaacctaactttatacctcaaagacctagaaaaagaaattaaggccaaggttaacagaaggaaagatataaggattacagaagaaataaacaatacaaaaacaataggaaaaaaatcaatgaaactaagagttggttttttgaaaagattttttaaattgacaaatcattagctatgctagaaaaaaagagaggagactcaaataaataaaattataaattaaagaagagacatcacaactgatgccacagaaataaaaaggataagagactactatgaacaattctatgccaacaagctggataacttaaaagaaatggatatgttcccagaaaaatacaagactaaattatgaagaaatataaagtctaaacagacctataactaatatgaagattgagtcagtaatcaaaaaactcccaacaaggaaaagcccaggaccagatagcttcactggtgaattctaccaaaatattttttaaagatttaacattgatccttctgaaaatcttccaaaaaaaattgaagaggagggaacacctccaaactcattttatgaggctagcattactctgatacaaaagctaaacaaagacaccacaagaaaagaaaactacaggctaatattcttaatgaatatagatgcaaaaatcctcaacaaaatactagcacatcaaaccaaatagtgcattaaagggatcatacaccatgaccaagtgggatttatccctgggatacaaagatggttcaatatacaaaagttaattaatgttatacatcacattatcagaataaagacttaaaatcacatgagcatctcaacagatgcagaaaaggcatttgacaaaattcaacacaccctttttgatcaaagttctcaaaaaactaagactagagggaaagtacttcaacataataaaagccatatataacaagcttacagctaatactatactcagtggtgaaaaacggaaaagttttttctctaaaatcaggaagaagctaagggcaagaatgcccttgcttgccatttctattcaagacagtactggaagtcctagccagagcaattaggcaagaaaaaaaattaaagacatttaaatcagaaaggaagaagtaaaattgttcctgtttgcagacaaaataatataaaatcctaaagatgccattaaaaagtattagaactaattaacaaatttagtaaagttgcaggatacaaaatcatttacaaaaatcagtggcatttctatacactaacaacaaactagctgaaaagaaaattagaaaaataatgtcacttataataacacctaaaacaatacttaggaatgaacttagctaaggaaatgaaagacttgtgtactggaaactacaaaacatttaataaagaaattaaagaagacacaaacaaagagaaagacatcctgtgttcatggattggaagaattaatattgttaacatgtccatactacccaaaacaatctacagagtcaatgaaacccccataaaaatctcaattacattactttgcctaaatagaaaaaacaattctgtgatttatatggaaccacaaaaaacacaaatagccaaatcaatcctctgacacaagaacaaagctggaagcctcacatttcctaatttcaaagcataaaaaattacactaatcaaaacagtatggtactgacataaagacagacatgtagaccaatgaaacagaacagagaacccgaaataaatccagtatatatgctgactgatcttcaacacgggtgccaagaaaacacaatggaggaagggtagtctcttcaataaatggtgctgggaaaactggatattcatatgcaaaagaatgaaattggattcttatcttacataaaaattaaccatacataaaaatcaccgtacataaagatcaactcaaaatggattaaagacttggatgtaaaacctaagactgtaaaactcctagaagaaaacataggagaaaactttatgacataaaacttctagaagaaaacataggggaaaacttcatgacatattcttattgaccatttagataacctcttgcttgtagtgcctgttaaaatcttttgctattttaaaaattgtggtaaaatagacataacattgaccaactttactattttaaattcagtagtgttaagcagtcacattgctgcgcaaccaatctctagattacttttcattctgaaaagctgaaactgtatacccataaaacaacagccccccattcccacagcctctggcaaccaccagttgactttctgtctctatgaatttgattactctaagtacttcatataagtgaaattatgcagtatttgttcatttgtggctggcttatcttacttagcataatgtcatcaagtttcatacacacaatggaatattattccgtcttaaagaaggaaattctgacacatgctacaacatgaatgaattttttatccattcattcatcaatggacatttggattgcttccacctttggctgttgtaaatcatgccgctatgaacatagatgtacacatatctctttgagactctgatttcaattcttttgagtatatacccagaaggggaattgctggattagatggtaattctattttttattttttgaggaactaccacagtgttttccatagaggctgcaccgttttacattcctaccagcagagtgcaacagttccactcactttctctacatccttgcaaatacttctttttcttttttttgttgtagccattttaatgtgtgtgaggtggtatcttcgtggttttgatttttcatttccctagtaattggtaatggtgagcatcttttcacgtgcttcttggccatttgtagatcttctttggagaaacgtctcttcaagtcctttgctcatttttttaaaaatcgttttgcttggctttttgttgttgagttttggagttctgcatgttaatcccttatcagatatatgatttgcaagcgttttctctcattcttgtctttttactctgttgatgttgtcctttcacgcatagaagattttaaattttgatgtaggcaatttatctatttgtacttttgttgtgtatgcttttggtgccacatctaagaagttactgccaaatccaatgtgatgaagcttcttccttatgttttctaagagttctatagttttatctctgagtttaggtctttgattcattttgagttaacttttgccattttcaggtgcgttgactgcctttttcttactcatttttaggaatttgttttcaaacatgtgttgcaaatatcctctcccaacccatggtttgtctttctactctattattagagtctttgttgaacagaagttttaaattttaatgaagcacaatttagcttctctcctttatgattatgtgattacgcgtttgtcaatcgagtaagaaatctttgcctaccccaagttccgtgaagatattttcttgttttcttctacaagctttattgtttaatcttttgtattcaggcctatcatttattcatttcacattcgttttctgtgtatggtatgatatcgggggtcaaggttcattttttaatatggatatccaatagctttagcgccatttattgaaaagaccattactttctctatcagatgcatttttcttgtaaatcaggtgactgagactgggtgtggtggctcacacttgtaattctaacactttgggaggccaaggtgggtggatcacttgagcccaggagttcaagaccagcttggccaacatggtgaaaccccatctctaaaaaaagatataaaaattagccgagcatggtggcacgtgtctgtagtcccagctgcttgggaggctgaggtgggagaatcacctgagcccaggacgtggaggttgcagtgagctgaaattgtgccattacactccagtttgggcaacagaatgagatcctgtccctaaataaataaataaataaataaataaataacatcatgtgactgtatgtgtgggagtatgtttccttaccctactctgtttccattgatcttcttgtgtctctttgtatcgatactatactgtcttgattactgtagcttatagtaaggcctatgatttatgtctgttttcatcttactggcctggcattgagaaggcccacgtagtacttgcagactgagtggagaaatgaagaaatgagttgcagtagagtgatcgttataactgctttatcattactatacagttatatctatcctgccatgtgggcaagaatgacagaagccacaggcagtcgccacctcttctgttagactacactctgtatgtcacccagtctcccagtcattttttcttctgtggttcatcttatagtgtgtgtgtgtatatattattgtgtattctatgtattgctctccatagtagacacaagaaccttaactacctaggaagcttgtaggtaggtgtgccttttgtgccacagtcacgtgtatagaaacaaaatgccatcaaaggaaccactagagacctgccagaaactgacaagagatcaggccactgcagcaaatgtggaatttgggtctctcttaggcggtgttgatgagagactggctggacacaaatggccagaagacaagcctgctgggcctgcgcaactctcatttcaggctttgttcttccctaagctctttcacccacaagcacttcctggaccatttaagataaacaggttgagttaagttcatagatgcccactgagttctcatgggtgtccagatgcctcttttaatcctcatgggaaaaatcggatataaataaacaatgagataggtaggtggatagctagctatgtacattacattagataacttagtagatgaattagctacaagcatctgggccttgtttgtagatgtgtgtaggtgaggtaaggctgtagcagctaatgtcagttcatttttggtctcaatggaagcaaggcttaaacactgtcgatacttttccaggagaaaggtaaaaaaaggttaacaagcttagcccttatgaaggaaaggaaggctgctaaaaacagtgtttggttacctgcagtgtcaggactgtgattcaaatctgtgtcctctctgtgaggctggtgtggcctggctgccttgagggtcaccactgcaggagtcacctgatggtccaagttcaggttctgtctctgctacttatcagttttgtgattttgggcctcagtttcctcacctgtaaaatgggaatgataatagtacccgcctgaagggtcattgtgaggaataaatgagtgaatttgcgtaacatactaagaacagccctggcacatagtcagagttcatttgctccgtctaggcacaggacattggtttagatgatcttcctctgaattattatgcccacagacaatcaggggaaatctgggcctctgcaagtctggcagagtagagtttttgctacatcattgcttgatcttgactgtgaaatgtgtttttgctttctatggggatgtcacaggagacttcattctccttggtgatatcagtttcacctggatccctgagctctctaacaggaagacaaataccagccgggtctaactcgtctaggattgcctaggcttctgtttgctttcgatagaatttgctttttgaccagtgtgcagaaattccaagccctgtttaggtcttggagttgggagggaggaggagaaggaaaagtaggaacacagagaccagtcatccaagggaaatgatttaagagcctcccagacagtgaaaaatccaccattcattattgagggaaaaagcagttaacaagaaactcagccctaaggttaacatggtcatgcagagtgacttgcatgcagggaggactttgatgcaagtgtatgtaggtggctgcagttaaccagggaagacttcctggaggatctcagatacagggaaggaaggtaggatccactcggtcattctgaccaagatcagggcccttgggggtttcctggatgttggccagcactcagggttcaaatcctgcctttgcctttttgtgtctgatctgaagcaattagcctcagccctgcccccatctataaaaaggggatgtgtaagaatcaatatgtttgttttgtttgggcatggtaggtggtcagttaagtgtttttaaatatttttaatattttactgagtgtggagttctgtatcaggcactggaaatgcaaatctgaatggagcctagttcctgcccaggccagggggaggcaggttcacctggaagacactgatgaactggttaagccacaggcctggctcaaggcagacatcccaggcttcttgggggaacagcactgtttgacccattggattagcagaaaacctcttccttccaacacaggctatctatggactctaggttgtgcctgttttccatgaatgaatccaggtcagagggtatgaggggctggtcaccctggaagcatggcccagcccagcagcagcagtgcgcccttgcccaccccatggggacccagttgtgccttccacctgctttcagagggcagtcactgaccacagctctgttagaagatctgcttgacataatgaggcttcacagtttgggactttatctcgtcattctggggcctaggaggggacgtgtggaaacacctcccagtgtccagaagccatcccagcacatcgtggggctcctgcctggagccctgaaacatttcctgtggccacattccagccccctgtgctttgcgtacattgaaccttgtattagtcagggttctctagagggacagaactactaggatagatgtatacataaaggggagtttattgaggagtattgactcacacaatcacaaggtgaggtcccacaataggccgtctgcaagcaaggaagccagtctgagtcccaaagctgaagaacttggcgtccaatgtttgagggcaggaagcatccagtgcaggagaaagatgtaggccaggaggctaagccagtctagtcttttcatgttcttctacctgcttttatcctggacacactggcagctgattagatggtgcccacccagattgagggtgggtctgcctttcccagtccactgactcaaatgttaatctcctttggcaacaccctcttcatccttcaatccaatcaagttgacattcgatattaatcatcacaagcctcccacctagagtctctttcttgcaaatctcaccatcaacatcttcccatagttcaaaacccagctcaaacaagggtatgctgactcctctgtggaattagtctccagactcctttctcggcatgtcccaccaggaacaacaatgtgtaaaggcagagagttcaaagtgtaagagcaggatggagagagaggaggccaggaagactgggtgggccctattttgacaggactgaaacgccaatggctgaatctctctgcattggggagctactgagaattactgacaaggggagaggtctggtgagcttggcaactgaagagatttctctttccacaatgaatagtggagtggggtggactgggagaaggctagaaacctggaagcaaggtgattaggaggcagttggaggaatttcatcagcttccccaaatgccagtagaaaagtatatgccagatttacaatattcacatggggaattagcaaaaatatagattctgggtccctttcccacaaattctatttcagtggatttggaatagggctagaacctgtgcttttatcagacaccacagacatttcagaggtggggaggtggactattcaataatgctgttgggacaactggctagctagggagtaaaaaaacttaagctttatctttacctcactccttacacacaaataagtgccagatggagccaaggtgacaatggaaaggaaagaagagaggaaaggagggaaaaaataaatcataatggaactagaagaaaatttgggtgacattctaaaaagtaatattggatgtgaaacctaaaagtcataaagggaaaaattaatggtacatttaaccacatggaaacaaaaaaaaattctgtacagctaagactaatgataaagagaagatatctgcaacctatatgtaaaggatcaatagcttcaatatcaaaagagtttatgtaaaccagaaaaatagtctcccaaatgaaataactgaatatgtttatgcaaaaatgctaagcctctctagagatcaagaaacaggttttaaaacataagatatcggccaggcggggtggctcacacctgtaatcccagcacttcgggaggctgaggcaggggatcacttgaggtcaggagttcaagaccagtctggccgccatggtgaaaccccatctctactaaaaatacgaaaattatctgggtgtggtggtgcacgcctgtaatcccagctactcaggaggctgaggcaggagaattgcatgaacccaggaggcagaggttggaatgagctgagatcaagtcactgcactccatcctgggcaacagagcgagactccatttcaaaaaataataataaaataattataactgaaacgtaagatatctttgtggtaggcaaaataatggacccccaaactatccacattctaagccctggaaactgaatatgttgcccattatggcaaaagataatttgtagatgtgatttaattaaggatcttgaggtggagagattatccaggtggactcaatgtaatcacaagagtccttaggagagggagagaggagtcaatattagaatgatttgttatgagaaagatgcggctggctgttaccagctttgcaggtggaaggggagccttccatgagccaaggaattcaggtaccctctagaagttgggaaaggcaaggaaagggattctcctctagggcccccagaaagaaaagtggccctgctgacaccttgcttttagccgagtgagacctatttcagacgtctgaccactcgaactataagatagtaaattttgcattaagccactaaatttgtggtaatttcttacagcagcaatgggaaccaaatacaaccattttgcctttcttattagctaatgttaaagagacagtttatattccagataggcaggaggttagggaaatagtgctcacccgccattggcggaagtgtaaatttctgctttttgaagagctatttgccagtccccatgaaaagcttcaaggtgtatcccctttaatcaagtattctcccttctaggaggttagcctgtgatatactcatacaagtatgcagaagatattctatgtagcatttcttggaatagaaacagctggaaacaaccttcatatctatcagtaagggactggctgagtttgagtacagccaaaaatggaatacagtgctgctgcccgcaaaaagaaagaggtaaacctagatatccatacatagatttaaaaaaagaaaaaaaacaagtcgcagatcaatataaatacattaggacgtcgggaagaacatatattaaattaactgtagcttctctggggaggggcatgtggggacagggagattcaggggaaagagccaaggatggtacaattctgcagtggtttaaaatttttcaagtaatttttcatttaagaattttcgtttaaaagaaggagaaagttccccagcatttctgttctgtcgttggtctttggaacttctggtctcgacaaaactaggggtaggaacccaagcccaaaggagaggcaggggacagaaacaaccagatttggggattgatgacatggctggggacaggggtggaggtggtgacagcccaagagagggtcagcaggtcaggacctggccagggcctagactggcagaagccggtgtccaggaggcctgggctgcttgctgggatacatgcggatccctgggcaggggtagttttctctgcacagaaccccctgattgctggtaggtcaatgctgtgggataccctgacctgagtgaggttagaatgttataggtgagccaagcatctgcagaaaaggcagggcttccaccaacaattgcaggttgcctggtgtcagcaactatagctcaggccagcacaggatccttccccagcccttcccccagagaagccaagaggatggtgggccagtaggtgggcctgaccttgccagtccacctctcagtcagtcccacggggagggttgccttttacaaagattagcaggtatcactagatggatgctcactttgaccaaggtctaacaggaatttgaggcataagttaccatgtggaattctcctcagcttaaggtcaatattgcagccagcctgagcaaactaggaaatgtggccagtatttttcagttggccacactgtcacctggtcttagatttcaaaatccaaaattgtcagaaaggaagtgatcttgagatcattcagcccaatttcatgttgcagaagggaaaactgaggcccagagaggaaagtgccttacctagggtcacacagtagacctgtgtgttccagggcttcctgccacaggttaccggacccatggcagccaaggtgactccaggcctcctgatctgcccttgctggaagaaacccacagaccaacccccagagaaagttgaagaaagcaagccagggaggcagccggctgcctgtggtgaggagacccaggtgctcagccccctggctctcaccaggtgtgctactcactgtcccacctgcagcccagacctctctgcccctgtagagctcccaagcaggtcaagtcagcgtcaggcagcacctgctcttcaggaggaattgacctcaaacagcagatcggaggactcagaaatgtctttagtttggcttgaagacttcccagcccgctctcgttgggtcggtcatgcctcttctctgggagtcagtgtctcccagaatcaaatggcaataagagggatgcaagtgttgtgagtttgaggacaggaatgtgctcatgtgactcttctatttggcagtaatcgaggctagaattcaggacactgacaagacagagccgctctgccatggtcctcactgaatggtcattatctcatgaaaatccagtgaccaagaagtacattggaggctgcaaagtctcaatctcagtaggagaaccatctagtgtggcttccatggagtcaggaagatggatctggtggcctggaaagctgtgtgccaggatcgtgatgattttcatccatgattatcagttctagcttgtgccctgggttggtatgaagccttcaatctgaaaagtatcccataaagtcagatccatcagacctttcaccacctgatcgcctgcctgtgttcttatccccactgctaggaccacttggctccagcatgcaggccaaggctctgcccaactcaagaaccaatgcttcccctgtttaggggaactcaggtctctcccaatatcctggtgggtcagtgtgacactggtttctgtgggggccctgctttgacctccgaattcaaccttggttctcatttcttgagcaccagctgtgtgcccgggactttacatacatggtaaccccagtcagtcttatgacagcctgtcagcctaaaagcagcagagccaggactggaatctagtctagagatctttccacacagccatgacagcccctccacagaaatgctttctccaatagcaatgatgattattatttattgaatgcttactatatgtcaggtgccatgccaagagatttatatgagtcaactcaatttaaaccacacatgacagttttactgtccctttttacagatggggagactaaggcttagaggggtgtccagattaggggaccatcagttaggaggtggaggagccagggttcagctgcaggctgcctgagtctcaaagctaccttgggagtcgctgtgctgtgttgccgcatgcatgggtttagtggctggatgcttaccttgctacaggtgcctgtcttgtgctttagaactaaaccctgatctgtgttgctacctctccctgtgtccccacttacctagacctgggttctggcaaacccttttcagcctcccagacaccaacatcacactccaatcccctggatgagttagtgtatttgttcaactgctccaaaagggaccaagtaacaagctcaaagatgtatgtctctctcaggggcaggtggctttgcttcacactgtcttcttgtcttcttgtcccactgttccttggggtgatgttcttgtccatgtggtcacagttggctcacccccaccacatccatgttccttcctgacaaaatggagaggtggagggcaagcacttttccttctggctgtggcctagaagttgcatacatcattggccagaactagctgcaagagaggctgggaaaggcagcctctagctggtggccatagacccagcttgggggcctttgattactacaagaaagagaactggctaatggaagaaatattcagtctctgccacaatccctgttcccagccagagctccgccttgaccttggcctctctctttgcccagacatccttctgtgactctttgactaccaatccctgttagtctccagacccatatgcttatatctggcttgttttgccaccacctgagcccacagccacttttagtatttttttgcaagtgaagaattctgctccagcttaaacacacacatgcatacatgcacacacacagagtgttgtacacagagatttttagaaggggcactggctttgttgctaggtcattaaataagaatatttactgagtgcctcctcttcagcctgtggccttgtgccctgggttcccaggtattaaagttaataggaaagttttcttatatttttgacatcagtatgttttattactgccagtaaaatttttgaccagattttggcatgttgggatatgtgggggtgtgtgtgtgtaagtaaattacaagcaaagagctgtattaagccccaccagcctggggccagcttagcctaacagctccttggacatcaggcccctgcccctatcttgccccagccttatctaactttgaccggggaccccagctcctcagtctagagcccaaggcagattcaagctggcctcctgccaggactggtggaattgtctacctgagagagcccatctcccacctgccctctggaaatgtcctctggggtgtccaccctgggccatggtcatgttgtcctgacgccttcgatacagaaggtgctttccagtttggttccagagcttcaggcctccctgccttggccccgggctcctccattacttcccactcccctgaggcttttgtggctccaaccccagcaagtcccgatctccttcctattgggctgctcccacagctagaccaaaggaagcttcttgaagtgggagctaaccagttggctgctgaagctcaggttcccctcagggttataagctggtctctgagcgagagctctcactggcctcatggcccattctgtgaccatcagtagaggctgtccatcctcttctggtctggggttcaggcctctgttggcccagctcctgggcccatttctctggtgacttttacaggtgctctcaccaattccctggaaaagtggctcttttctttatcacttcaagtttgtgttaaaatttcacacataccctcagaaccacagaaggtagaaaagaaccattttcttagtgtctgttggtcacagtcattagaacggtccttcggtttatgccgcaccacatttggaatccattccaagacagaagtctccttaggtcctgcaggttcccctacatctgcacctgtggtcctggctgcccttctccccctgcccctcctcttaagcacttcagacctgtcatggtgtggtagagcaggctggcagagagcactagtccagaagtccaagccccagtgtggcttgggctagccaccctccaccatggctcagatgcctgttgtgcagaatgacagggtggcccctccagctcacaggcctcgctcactctgcgccctggcagccaacggtgctcctgtggcctttttgctccccactcagaagtgtgggtaggaggcctctgcttggagaaacaccatgtccagcccacaggtgcaggctggacactgaccctgggcaggcagtgctggccctgtagtcatctgatgatgcagcagtcatctgactgtctccttcatctaccctgcccctcccacctggccctgggaattgcaccaaaccccagctgctgggcgctccaccacctgccaaggagagccttgtggctcagtgaggggagaaggcaggactaagcaatgtagagtcctgcctggccagctgacccccactcagattgatcatttcaccacccagtcatgctgcagggtcccatccatccatcggaagaagcaaagcttaccactagctggtgttttggggctgctctcagatccttgcatgaaaggatcaataagaatagtaagtatagccaacccttgattatccacacatagcacccaaaggcctctccatcacagtgcagccaggctgaggaggcccagcccagcccaaagagcagttctctctgtgctgcaaaccatgtctaccatgtctgatttttagaaggctcagcacttctgcccgccttagcttaggtaagcaagacctggggtaaggctgccaggacgagttccccgacctttgctgggctcccctttcttctgtccagcagctgcagtgtggttaggacataggttgaaagggcaactctattgttcagatgctagacaattccttactccctcttgccgtggatacagcgatgtcccctggggccatgccggtgcttccataggactaggggccatagactgcagtgcgcatcatgccacagaagccacagagaacttctgttaattgaggtgggagacagtcctggctggggggtcaagaggcacaggatggtccagtcctgccaccattcccgtgtgattttcagggaaaatcatatcacctttctagccttcagtctcttctgtcaagtgagaggaatggactagacagtcagtctctaagaatctatcagaagatcacggtgtaactttagtctccatagaagagatcaaaagtatgtatgagacacccagagacagttggcacttatgcctagttttggccgtaaggcaaatattaattgtaagggtaaccattttgtcctggtttgcctgggactgtctttgtttattcctgttgttcctcgatgattgttagtagttcccatttcattctccaagtgtcccagtttggatggtatcttatatggccaccctgttgactgagatgtaatctaatgaaatgagatttgtctgtcttccccacactcagcctgctttggtacaagtcacaggaggcctttgactgctcataggagaatctctgctgatacacagtctttcattgacaaatatcaatcactgtatttgcaccatatccaatgactagagggatgtcattgaatccgtcactgtattcaatgaccagaggggtgtcattgaagacataaatgatctcctgcatcattcactgctcctgactgaagtgctacatgaaaaagttttgcaagaaacttagatgttccatcctgtctggctataagactccataatggaccaaatctcccttttctccttggctgccaggaagctcatatataaatatatagctgaattatagaaacaccataagtccttattattggtatagcagtactctttttatcccaccaatcctgactttttgccttatttccattttctttgttctgatttgttattcttatttatgattttctcatatttatagtttgtcattcttctataaatatggttttgttatagttactttgaattctttgtagcaccaagtagaaaaggcacacaaaaggagtgaacttagaggatatgctttttagctaaaagatcaaatcacctgctcctccaaagcatatcacagtgtccgagggccctgccctttaagagacaattatttgagtcttaaagacttgttcgtcttctgagcacctgcaaaaatgtagtaagtggcattttcaagtctgtatcatcacacacctagtgaaacgcagagtgtgagcatgaggggagcctgagggcaggatgccgggggtagggcatgctcacaggagaaaaagcaagcacagagatgctcatcactcacccagggcctcgccaagggatgccaggggatggacacctgagaaggggctggggaacaaactctggccatgggaggcctgggtccaggtggcaacactgcctgttagcaacacgggaccttcagtaagccatcttcatgatgtccaaagtcaggtggttgggtgagatggagtccatggtgactccagccttgggattccgaccctgttcctggggaggagggccctgaggatgcacctgagcccaggaagctgagactgccctgcttgcagctggccctaggaggaggcacacacttggggctatatgcagaccaactttgctcctccacttgagggcaatgatccccatatttccatggcatccccagggcactgactggacaaggaaaggctgcaaagccagaggaaccttccagaatgatcctcctggcaattgcttggatcaagcaaatggtcacagctgtgtcagattgtaagttctcacaggctgtggcagtagtttgcagttttgtcttcaaacatgggctggggtgcgggttagcaatggggtaaaaagcagtgaatgatgtcccttgtggacactttcagaacccagggccagagagaaatactaacctgagaataatctaccccttggaaaactcacccctgaataaaccacaggcacttccctcctgcaccagccatggccccatccagagttcacccagcagcatctgcatctccaatgtcattgggcccactgcagctccgaggcacagtcgaggcaggatttgttatctgttttaccgattaggcaactgaggcttagagagcttagacccactcagagtggatcacaaaacagagatgagagcccaggcctctgtccctaaccaccctgcagttcccagagcccactttgccttctgttctcagcatcccacatggccacagtcctcagaaacacactggcattcaggtcacccaacactgacatgggagcgggggaggaaagaattgcagggcttgggcatgtggagccggagcctgtggttctgcttgagtttccctggttaacttttgaggggtctcagccaggtgtggcaccgagtctgggctgcccaggctgtgcatgagtcccagtaactctgtcttctcttttgtgtgtgtgtatttctgtgtgtgtgtacatctatcacacagaagaagagcgtgatttctcctccaaggccgttgatctccaacccagaactaaaggggagaagagccacccccagcatccagcgtggcatctcttgtgccaggaccagggatgactgggccatggacacagatgtctccaaccttcaaccgtttgcatagcacacgggggactcgtgggggccacctgccactgccagctgaaacaatacaatggcaatactgacatccttcatgacgttttcccgacagacattcaggcagaaagtgctggtgcgttttctgtctgcaaagtagagggccatgcctcaccaatagaatagcgtgggccctgatgacctgctccgagtccactcacagccagtgacacttgcaaaaaactcccaaagccgtcttgggtttggctcccacagctcttgaccaatgtggccaaagctggacacctccttgggacactgggattattcataaatgcagcccgccctgactctccctgaatagcatctgaagtctttgtgaaggtcatggatcctgaacaaagtgtcaagggcaccaagaaggctgagggaagtccccggaagcggctgaccaaaggagaggccattcagaccagtgtttcttccagcgtcccatacccaggcagcggcacagctgccacccaagagagccccgcccaagagctcttagccccgcagcccttcccgggcccctcatcagttcttagggaaggctctcaggagaaaacgggccagcagcagaagccccccaaaaggccccccatcgaagcatccgtccacatctcacagcttccgcagcaccctctgacaccagcattcatgtcgcctggcaaacctgagcatctcctggaggggtccacatggcaactggttgaccccatgagacctggaccctctggctccttcgtggcccctgggctccatcctcagagccagctccttccttcccacgcttccatcattccccccgaggaccttcctggagtccccaaagtcttcgtgcctcgtccttcccaggtctccttgaagcccacagaagaggcacacaagaaggagaggaagccccagaagccaggcaagtacatctgccagtactgcagccggccctgtgccaagcccagcgtgctccagaagcacattcgctcacacacaggtgagaggccctacccctgcggcccctgtggcttctccttcaagaccaagagtaatctctacaagcacaggaagtcccatgcccaccgcatcaaagcaggcctggcctcaggcatgggtggcgagatgtacccacatgggctggagatggagcggatccctggggaagagtttgaggagcccactgagggagaaagcacagattctgaagaggagactagtgccacctctggtcaccctgcagagctctccccaagacccaagcagccccttctctccagcgggctatacagctctgggagccacagttccagccacgaacgctgttccctgtcccagtccagcacagcccagtcactcgaagacccccctccatttgtggaaccctcatctgagcaccccctgagccataaacctgaagacacccacacgattaagcagaagctggccctccgcttaagcgagaggaagaaggtgatcgatgagcaggcgtttctgagcccaggcagcaaagggagtactgagtctgggtatttctctcgctccgagagtgcagagcagcaggtcagccccccaaacaccaacgccaagtcctacgctgagatcatctttggcaagtgtgggcgaataggacagcggaccgccatgctgacagccacctccacccagcccctcctgcccctctccaccgaagacaagcccagcctggtgcctttgtctgtaccccggacgcaggtgatcgagcacatcacgaagctcatcaccatcaacgaggccgtggtggacaccagtgagatcgacagcgtgaagccaaggcggagctcactgtccaggcgcagcagcatggagtccccaaaatccagcctctaccgggagcccctgtcatcccacagtgagaaaaccaagcctgaacaatcactgctgagcctccagcacccgcccagtaccgccccccctgtgcctctcctgagaagccactcaatgccttctgccgcctgcactatcagcaccccccaccaccccttccgaggtagctactccttcgatgaccatatcaccgactccgaagccctgagccgcagcagtcacgtgtttacctcccacccccggatgctgaagcgccagccggcaatcgaattacctttgggaggggaatacagttctgaggagcctggcccaagcagcaaagacacagcctccaagccctcggacgaagtggaacccaaggaaagcgagcttaccaaaaagaccaagaagggtttgaaaacaaaaggggtgatctacgaatgtaacatatgtggtgctcggtacaagaaaagggataactacgaagcccacaaaaaatactactgctcagagcttcagatcgcaaagcccatctctgcaggcacccacacatctccagaagctgaaaagagtcagattgagcatgagccgtggtcccaaatgatgcattacaaactgggaaccaccctggaactcactccactgaggaagaggaggaaagagaagagccttggggacgaggaagagccacctgcctttgagtccacaaaaagtcagtttggcagccccgggccatctgatgctgctcggaaccttcccctggagtccaccaagtcaccagcagaaccaagtaaatcagtgccctccttggagggacccacgggcttccagccaaggactcccaagccagggtccggttcagaatcagggaaggagaggagaacaacgtccaaagaaatttctgtcatccagcacaccagctcctttgagaaatctgattctctcgagcagccgagtggcttggaaggggaagacaaacctctggcccagttcccatcacccccacctgccccacacggacgctctgctcactccctgcagcctaagttggtccgccagcccaacattcaggttcctgagatcctagtaactgaggagcctgaccggccggacacagagccagagccgccccctaaggaacctgagaagactgaggagttccaatggccccagcgcagccagacacttgcccagctcccagctgagaagctgccacccaaaaagaagaggttgcgcctggcagagatggcccaatcatcaggggagtccagcttcgagtcctctgtgcctctgtctcgcagcccgagccaggaaagcaatgtctctttgagtgggtccagccgctcagcctcgtttgagagggatgaccatgggaaagccgaggcccccagtccctcatctgacatgcgccccaaacccctgggcacccacatgttgactgtccccagccaccacccacatgcccgagagatgcggaggtcagcctcagagcagagccccaacgtttcccattctgcccacatgaccgagacacgcagcaaatcctttgactatggcagcttgtccttgacaggcccttctgctccagccccagtggctccaccagcgcgggtggccccgccagagagaagaaaatgcttcttggtgagacaggcctctctgagcaggcctccagaatctgagttggaggttgcccccaagggaagacaggagagcgaagaaccacagccctcatccagtaaaccctctgccaaaagctcattgtcccagatttcctctgcggccacctcacatggtggacccccgggaggcaagggcccagggcaggacaggcccccattggggcccactgtgccctacacagaagcactgcaagtgttccaccaccccgttgcccagacacccctgcatgagaagccatacctgcccccaccagtctcccttttctccttccagcatctcgtgcagcatgagccaggacagtctccagaattcttctccacccaggccatgtccagcctcctgtcctcaccatactccatgcccccacttcctccctccttatttcaagccccaccgcttcctctccagcctactgttctgcacccaggccaactccatctcccccagctcatgcctcacccagccaacatccccttcaggcaacccccttccttcctccccatgccatacccgacctcctcagcactgtcttctgggtttttcctgcctctgcaatcccagtttgcacttcagctccctggtgatgtggaaagccatctgccccagatcaaaaccagcctggccccactggcaacaggaagtgctggcctctcccccagcacagagtacagcagtgacatccggctaccccctgtggctcccccagccagctcctcagcacctacatcagctcctccactggccctgcctgcctgtccagacaccatggtgtccctggttgtgcctgtccgtgttcagaccaatatgccgtcctatgggagcgcaatgtacaccaccctttcccagatcttggtcacccagtcccaaggcagctcagcaactgtggcacttcccaagtttgaggaacccccatcaaaggggacgactgtatgtggtgcagatgtgcatgaggttgggcccggcccttctgggttaagtgaagagcaaagcagagctttcccaactccatacctgagagtgcctgtgacattacctgaaagaaaaggcacttccctgtcatcagagagtatcttgagcctggaggggagttcatcaacagcagggggaagcaaacgtgtcctttcaccagctggcagccttgaacttaccatggaaacccagcagcaaaaaagagtgaaggaggaggaggcttccaaggcagatgaaaaacttgagctggtaaaaccatgcagtgtggtccttaccagcaccgaggatgggaagaggccagagaaatcccacttaggcaaccagggccaaggcaggagggagctagaaatgctgtccagcctgtcctcagatccatctgacacaaaggaaattcctcccctccctcaccctgcattgtcccatgggacagccccaggctcagaagctttgaaggaatatccccagccatctggcaaacctcaccgaagagggttgaccccactgagcgtgaagaaagaagattccaaggaacaacctgatctcccctccttggcacctccgagctctctgcctctgtcagaaacgtcctccagaccagccaagtcacaagaaggtacggactcaaagaaggtactgcagttccccagcctccacacaaccactaatgtcagttggtgctatttaaactacattaagccaaatcacatccagcatgcagataggaggtcctctgtttacgctggttggtgcataagtttgtacaaccccaaccttccgggggtttccactaaagctgctttgtccctcctgaggtctaagcagaaagtgagcaaagagacatacaccatggccacagctccgcatcctgaggcaggaaggcttgtgccatccagctcccgcaagccccgcatgacagaggtaagttcagccttgtttttcttctcatcactgatttgcaaaagcacttggcgagcttttaaagccacagtatcctcaggttccagttgcagaactagagccagattagtagtcagatttcctctctgaaagctgagactggtcaccttacaaggaaacatgtttattgagtttctttgtcactgtatccctcatatcattggaatagatacacttcaataaagttagccataaagtgatcctgctctgccatgaatttctgttgtgaaatcaaagatacagtctcagtaagaaaaaaaagaaattttccaaaagactgagttggaaaacttggctaacaggaatgcctgtagcaattttagaactttttacctctccttcattatatggatatcccttgtcttgttagtcttttcctgcttttcttaattcttacatctgctgtttccattctctagtaccactttaaatcttcccatttccaagattctagaatttggcacaaacaactcctgaaatattccttcttccttttctgggagtaagacagcaaatggagctgagctgcagtatccctccttaccagtggatggcaatgccactcacagtttgacctatttgtgctacgtggtcaagaaacgctaatgtttacgctttcattgcctttgatctgaggctacatcaggagctataaaatgaactcgtcccctgaaagctcagcaagtttgaaattcaataatttcaaatgtcagacaaaagccaccaccataccctgacaaggccagcctagggatttggattgtgctgacttggcatttgtggaataacagctggtcttgtttactgagcagcctcatggtgccagacactgtgctgggcccttgaatctggtcactgctcacctccacctctgaagtaacataaccatctcccttctatagcttagggaactgagggtcagagtctgagaaaggtcaagataatctggcaaatgttgaacaaacccagaatttgaacccagacctatctgactccaaagagtctatttttcttcttttaattatttgaggagagaaaatcttaaaagttgactgcaaattaaaaaatgtttattagtgtgtcttcagaccagaagctctgaccaaattaggtctaaattccctaaaccaaattcatattgtagataagtgagcacaactgtgttctataatttcctgtgctctcatatcttccccttttgtcattcagtgaactttgtgcattgaatttgtccttagcttgactggatgttcttcacagaactgttttccaaatttattccctagatgtctttgtcagtctacagacatccctgaccaagatttccacttttgtgttaatgtcctgctaatttcctcttcagcgtctcttactagctgtggccactcccaagatgctgttataattattcatactgctaactttttggatacctattatgtaccaagtactatgctaaatgttacttttctcctcacaaccaacttgaaagttagggtgcaatatcaccatttcatagatgaggagaccaaaatacaagagaggttaagtaactttcacaaggccacacagtaaatggcagagcctagatcaaaactagattttactccaatgcccttttgaattatctaagctgcctctagtttctaatgactgaaaatgttacaggccatttaagagaaaggaagtgttaatttggattcggcaattatttatttatagtgctcctaaaacctgcgaactttttcttggaatattctgtttggttcactggcatgtttccttccagaattgcaccaatctggtacattagtataaccacatggtctatggcttaaggccttttatacaactacacctctctctggtctctgcttgcatacttccagcaagaggaactcaccatctcatgatgcagtccaattcatctttggacagtgctctaagaaggttctttactgtactgagctgacatttgtcagcttgcggcttccattctctgttagtagttctgaaaaagtccttaggtctatcttagcattttgaagctcttccaaaccatcttcatgcaggtctaggacaccccatgatgtttttgtttggtcatagatcttttcttccacgtataaaccctggagaaaccccagcttgttcagagtccactttgtagccacattctttcctttttcctccttgggaatcattttgacaacaacacagcactgtcacaaagtgattaagaacaaggactcaggtaccaagttgcccaggtttgaatcccactaccttacctactggctatgtgaccttgggccaataacttcacctctctgagccttagtttcatcctctgtaaaatagggataataataacacttagcgcataggactgtggagataattaaatgagttaagacatgcagagtgtgcttagaacagtgtatgccacactggcactcagtaagtatttttaactatacttattcatattgttgtcatcaaaagctaaaatggatccctggtccctgctcagttccaacactgtgtttcctgggaaagtggtacactgccacccaaaccagcctcctccagtgtggcccagatatcacggcaggctgtgagggagaagtagtctgtttgcctgtgggaggcaccttggtcattacatggacagtctagatctcaggccggggtgcagtggaaatggtaggctctggaaacccaagggtattgcaaaaaactagctgccttctgccaaagcagcagtccagattcttgctcggtttccactcccctcctccaaatctgaagagattatttggtggtcactgagtcacagaagttgccctggaattgatcttcaagatggtctaaatcccctcagactctgaggcccagagaggtgaagtcatccaccaaacggcagcccagtgtgccatggcctatctggtgctggaactcagactccctgattcccagccagtcacctttctacctagccccatgctgtccttgtgggggcaggtgtggtggctggcaaaggggactgccgttcttagattgccccagcatcaggaaatgtggttgcttcattcactggatggaaacagcatggtttttcatgaccttaatgacagtggcatgaagtaggaggaaattctcactcccagcccctaagcacagcatttctgctccctaggcaaaagtgcacccacccctgacaacactgcagtgtttacaggacgtgttcttgggatagtggaagatgtccaggaagcacaaagccaatgccagctctccccttaagctagctctcatcactgaggtgtggctctgtaaagagcgtgggtcctgcaggactaacagcccagagcctgcacagcctctctgtgcctgtctctatggtggaattggggacgtcctgctggtcagggtcctcagcccagctcctggcctttggtactagctcaggagggccaagatcctggaagcaagagacctgtgctctgctcccagctctgcccttaactcgctgggtgaccttagctttctgatctataaataagaactggaccagttcatctccaaaggcagagtggagccttgttcatgtgttcaacattatttaagcctcttctctgagacaggccctgtatggggttctggggtgcccaaggagaccaagatgaggacctgtccccaggagttcccagactagtgtaaaagacagagaacaaacacaggtcttatgggaggttaacatgaaagagacagggttccagctgtaacaccaactaatggcatggccttggataagggaattctctctggggatcagtttccttaattctgtaaagtggagctaatagcacctcttcatgggggagtgtgaagattgcatatgtgtacttgtgcagtactgtgtaaggcatgattattagcattgcattcgtgactgaggatgcacttttaaccagcaatgattttgtcattcctgcggtgggccaggttcacctcccttcactggtttccccggaaggccagaaagatctagctagagtggagaaggaagaagagaggagaggggagccggaggaggatgctcctgcctcccagagaggggagccggcgaggatcaaaatcttcgaaggagggtaagactcatgtttggtttccatcgtctgcttccgtggaataagagctggtgcccattggtgttcacgggcagcagtggctcagttggcaagggctctgcccacaggtgccctgtggtcccagcgatgcctttcagcagacatcaccttcctgggactctcaggcccctctgtttaagaatgccgtggggcttcttggtggggatgggtgatgctgggtatttgttgaggatctggagaggtctgggtctttctccagcccctcattttctcagatcctggccaggtttctagttcctgcattggagttgccatcccagtatcccagcaaatgtccagacttctgtctctcttgacatgtattctccaaaagtcatctctgtactgcccaatggccatcttggcatgtctggtttcccatggggcacttgggctcagccgactaggctgtttgcagggctgactgcacactgtatgcaccaggtgtttccactggtccctatcctgactggctggggcccagggctcaatggttggtgaatattttgaatctcattcatagttattcacctttgatgcttgactttgggaaacgaatggtctaaacgtttcagagctcacagcttcagggactgtctgggctctggaagggtgccgtgtttcagacgtgctttgtggaagttttgtgccagctgtgttttgtgtggccacatgtttgcttcctgggatttgggtgtctgtgagcaggtcccatggcgttctgtctcagggtcctgtgtctgtgtccctggtgtgatcagggtggcctggtcctgcacagccctgaaggacaacaacgtagaggaaaatgcgcttcctgtgcaggacagtccccatgagctggggccaacatggctgtcactgggggcctctgatcctctagcacctgcaagcgcctaactcacagggtcagcgtgggaggcacgggagtcctccataaggttgggggacaacagagactgccaccctccccagggccaccagttggcatcttctggtggcactgaccagcaggggctctcaggagagagggtgcttggaaatgtgggcagcagggtagtcaatgatgggaagggggccaggggtagcaaatgcccctgaaacctactgcctaaaataccaatagcagctgcgttgaaaaaacactgaaccaaaggtctttgaaaatgccaaccctctttccgtgtggggagggacgcgggtcctcctgctgtttggttagagcgccctcgtgtgtctctgtgttctcatgccactggatcccttagaggccacacagaggcaggattgatgaagcgcctgctcacagcgactggccctcttccttcttgcttcagaggttctctgtggtctctgagggctgctgagtgtttcctggtgtcccaggagcttgccccagcagcagtctgtgtgtgcccggggaggttcgcatcttccctgagaggcaggtgctctgagacctcaggaagcctgagcctccagaaaggcagctggcaggagccactccgtgcccagctccctgctggatgtctctacctacacggtctgcaatggctgaaggagggggaacatcacccacaagtcctcttctcttcctccagctggtatgggtcctactccctctccacctccttccaggtcttcacttagtcccacctgctctgcttcagaatcctctcggttgagttctgtcatctctgccccacttacctctgttctgcctgagactagccccccagctctcccgccctcagtttctttatctgtaaaagggggagaataacatttgtaaaagggggaaaataacatgtgggattttcagaggaccttgtgagaccccatatgaaggctataattcatagctgctcaaaaaatggacattggtgcattttactactagtatatccattttgtcaatctctgtctgggacagtcccatctgttctgtcagatatggaaggtatcctctccctttcaacttgtcacatgcaatttgagcacgtatggaactgattatagtgtcagatcctttcctcccccagcctggctatctcaagctgggaccatgcctcccactctcacttctggtgattcttctacattcatggttctcttggggctggcatcaccccgcagagtgtttggaaatggtgaaggagggggagggcattttggttgccacataactggcatttcagggacgaggccagagatgctgaccttccattccaccagccttacaacctcttgttcccccaaattgccaagagtgcccacacccagaatcactgggcacactcctctgcaatcccacagttttgccttagactcagttcttccttttttttctttcttttttaatacaacaaacatatgtatttcactcctgtacacatttgagaaggatctgctatggagctctgttccttagatccaggccagtagaggctgagagaggaagaagaaaacaatggttccacccagaagcttctgctcacatttaaatggccaaagcaagtcacatggcctcacctagctccatgggagtagagaagtgcattcctaccgtgtgcttgggagaacctgaaatatttggtagatatagtgctcatgactattcaaattggtttaacatacatctgtaacttgttatgtttactcaacagtgtttttgacgtgcatccatgttgatacatgtagacctagttcatcatgaatcagtaagccagacacaaaagagtagatgctatatgagtcttttaatctctaattaaacttgccttaatttctttcttgacctccatttcagtgactgatcaatttattaattcatcagggaggaggatctacttaatcagtgccttttgggtgctctgtgtcagaaaatgcagtgtcccatgggggttaactgtcatcctgccctcaaggtgcttggggactacaccaaggtggcaacacaagacccactgctaaggtggggatggccagagctgagaagctcacagcaaaggaaggatgcctgggggatggaatagctagagagggcttcccggagtgggtggggccgggcccagaagggtgggcgagacccagacaagtggagaggaagggtacgctgcccagcagtctacctgctacaggtgtgatggcagctcccatacctgatcagtgagactcacttcctcttgccttgagcattctcccttggtagtgtcacccatctccttagccccaggcctcatctctgtgccgacattgctacatctgggtctccagccaggacctcacccctgaactgcagacactggttttgatgcctcctgagcatttttgcctgggaaattcacacctcacacttagcatgtgcaaaccaagccttccacttcccaccaacagcatctccttccacatccagatctcagatgacacacccagcccttcacactcagaaccttaacattgtcttggacgccttctccccctttccagttagaccccaatcctggtgtctgcatgaagtagtcagtgactcagtgtggtctctttactccctctgccactgctctggccaccctatctctagaactccaatgttggtgccactgagcatcactaaacatgattctgcctgtgtcatgcttttctccagagccgtctgtggctgcctcacctacaggatccagtttaaactcagcctgtgagtgctggcctcagaatctgacctgttcctgtcgcccttcaccttttgctgcctgctgggccctgccattgccaaatcctacccagccttcaaaagccaatactcagccctgctcctctaacgagcctcccaaatccctccacactctgtagttctttgtgttacttctgtcataacactggtgctaagatccatttctgtctcctcccaagtcccttcttgacttgggtcctggggtaatgctttgcacacacaatgcatcagtctctgtttattgcactagtttcctggcacatggccccctctgcattccccatcacttccacacctgaacaaagcccgcattttccaggcagcccctgggagtgcccatcagggatgtgatggctctctcacccagcacctgtgcatttgccttggttgtttagaatggctttttgttaagcagtgttgttttcacacacacaaagttatgttgttccttgagagtaatgactatattgtcttaactcaagttcacttattgcaaggaaagctgggaattcagcccagtgggcttacacggaagaggaagagactggaattgataggaaccacctggctgaccaagcccagttgggtggtgtgttattggggcttatgtccgaagggaatgataagttcagatggtgagatcccaggagtccatgccagaccctgcgtgctgcaggactcagctgctgcacctcctatgggagggcattggctcccatcccacctcacctaccccagtacctcactccagccattgccactctcctgggccaggagagtgctccttaagcatacccagacttaaggtttccaccttaaaaatactttggctgaagggccatattgccagatttctctgtttcctttaaagaaaaactccagaagaaggtgactgtgttgctcacctccgtatctttcctcctggcttctctcagacctattcaaggtgggcctttgggctcctcacacctcagaagctgctcttatccaagtcaatgatgaccctcaccttgcagaagtcagtagtcagttctcacttctattctttcctgagccatcggcagcatttgacacagtcaatccttcgctcgtccatgcaggactttgtcctcttggtttcctggacactgcctgtattagtctgttttcacactgctataaagaactgcccaagactgggtaatttataaagaaaagaggtttaattgactcattcacatggctggggagacctcaggaaacttacaatcatggtggaaggtgaaggggaagcaaggcaccttcttcgcaaggtggcaggaaggaaaaatgcatgcaggaggaactaccaaacgcttatgaaaccatcaggtttcatgagaactcatgcactgtcaccagaatggtataggggaaactgcccccatgattcaattcctccacctggtctctcccttgacacatggggattatagggattacaattcaaatgagattttgggtggggacacagacaaaccctatcaccttctttcttgatcctcctcttccttgactggttacactttctcaccatcttcagtgagtcccatcatcgcctgatctctgaacattagggctccacatggcccagccccaggctccgtgctcttcctctaaactcagtcccaacgtgatctatacaccatctacaggttgatgacactcagatccctatctccaaggacttctcctctgaactccgggtcatgcatccaacttcgtatctgggaggcggtccacctgcacatcagtgaacccaccctttgtccacagcacagcgcatactgcagaactgtgtctcaggcctctttgacattccttaaagaaattattttaaaagtttatttaattcattactgttccagttgaaggggttacatttttaacgagtgtacttttctatctcatctatttctatagctgaattaatttttatccaagtcttaagagttcatgcagtgtacgcagcacgtttttgtgacagtgcatttgtacattttgaagtgtgtgtgtgtgtgcctgtgtatgtgcacacatacctgtgtgtttcatgaaatagtagcttggagagaatagtgttagttttaaaaaatctaaagattattttcttttctaatagtttttttacaaatccatttcttcttggactttgaaacccagaagtgtagcatgattttcagcctaatcatctgctgtgcctagtcccattttgctgtgaactccagatttagaattatgtctttgggaatatgtgttacctctgtgtatttattggggaacaaattgattaaactatgaattaaataagtggtaataagttggagccttttggataggtgtgtaaaaaataaagtcagtaagccactctaagaacctaaacagtagcaaaaccacataccacaggagggttggtggcgtggaggttgggaaatgtataacataggtagacaaactgtgcccattacccacacttgctttatatctctttaaagtcttttaagtggtcaaagatgggtatagtagtcagttcttgcattgctataaagaaatactgaagactgggaaatttataaagaaaagaggtttaattggctcatggttctgcaggctatacaggaagcatgctcctggcatctgctcggcttctggggaggcctcaggaaactttcaatcatggcaggaggtgaaggggaagcaggtgcttcttacatggctggagcaggagcaagagcgggagggatgtgtcacacaagttttaaacaaccagatctcagaactcactatagtgacgacagtatgaagaggggatggtgttaaaccataagacactgcccccatgatccagtcacctcccaccaggccccatctccattactggggattacaatttgacatgagatttgggcagggacacagatccaaaccatatcagtggggaaaggcatcttctgaaggagagcggcaaagtcactcattcagttaagcaagatggacattctgcataggcagtttcatttttctagatgcttggaccgaaagccactctgtcttacatcattagcaaatcctggcagcttggccctgaaaccgtatctagaatctgcccatttttcccaacctctgggtcaagccactggtagctcacacctgggtgatcacagtgtcctacagtcacctgctcccaccttccccactgtggtccgttctcagcccaacaagagtgatcctgttaaggtccacacaccctgccgctcctacgccgtgtcccccgaagccctcacgggcctgcatgtgccggctccagctcctccctgacctctgcctatggctctcgccctgctccctgggctttggccaagctctgctctttgtaagacaagcttctgccccagggcctttgcacttgctgtgctctctgcctggagctctttttccagagactctcatggccccctcacttctctccatcacccttcagtgaagccttcccacactacccacgatgaatttgcacactccatggcacttcttatcctcttcctttcctgctttatttttctccaggtatttactagtgtgcttctgtttcctccaccagactgtaagctctgtgagagggcaggaactatgttttgttcattgctgtgtccccagtgctgagaatagtgcctggcacataggcagtgctggggaatatctattaaatgaaggaatcttcctccaatgtgctcaggattgactgagaccttgggtgagagggcaggtccctgaactctgcagctcttagaatctgggaacagaattgagactctgggtctcaggaaggatcaagggacacaacgaaggcgaaaccaggccagtgagaacccatccatcagcctgaaggcaggcttggtctggggaaggtgaagtcagatggcctctgttatggggcaggctctggggttgggagccaaggactcttccttgcagaccattctgctctgcaggtgttcaaggtaaaaatgaaatacataatgccagaaagggatggctcgtgggccagctcccaggccagggccttctctgagcagagccctttgtgttctagaagccgagaaaatgggtcctacgttctcagctctgggtgaggggctgctcttcttctggggtgggtctaggctatcagggccctgccttatccctgaggcccagcaccttgctctctctttaattctcaggcttctccccagaaatgtagatgtgcagctctgagcatggcccaatgggctggggagtgaagtgtccagcccccatcacatgagcccacgctgggctatttcctctttttctttatacctccaaatcctgttgccccctctctcctggggaatataacccagactttgggaaggagtagtggttgtcagggcagcacgaagagcaggatcctgaaagcccaggtgagacatcaatggtttagaccaggaacatggcagtgaagatggaaagaggagctataggacttctgatgactatggaggctgagagagaagcctccacttgagactgactaccgtatttcttgtagtaaccactgagtagatggtggtgccctttatggggtgagaagggatggaggagggaagtgaaaaataggtctggggacagggagatcaaaacttgttggacatgtgacttttgagatgccaggccaagtggagatgttcagggagacatttggcaattggatagatgagcctggccctcagaggagaggcctgaggctgaatacactcttcagagttgtcagtgtatagatgcaatttagtgctatgggccaagatgggccatcttgggggagatggagaagaaagaaaagaaaaaggcatccaggactgatcccaggataccagcatttctagggcagacagacacactgctgcagaagagattgaggaggaatcgccagagaagcaggaagagacccagccaagtgtgaatcctggatgccaagagaagagaatgttcaaggaggaaggaggctcagcccggtgaggacaggcatgtggcacgtgcccattcaacagggccctgtgcaggtgactggtgactgatgggcgctgtttccatagtgatggaaccctgatggtatgggccaaaatgaggagtggaggtgcctgtgtaagcgttgtcctaagagactggctgtggaggaaagcagcacaaatcagggaagcagtgcctggagggagtgtgagctggagcagacaggtgtttgaactgagaagtcctcatgtgtgtttgctgcaaggaatgccttctagcaaggggcaggtgatgatgccaaggagagaaggggcagggggcaggagcaaagccctggggacctgcaggggcattgatgagaagaagacacttccctggtcatgataggaggaagagaggatgctggtttgggggtgggcagtggggaggattctctcagccccattccaggcctcttttcactattccaggccacctatgggcttgaggtcttcacccaccatgcatttgtgaatgactattttgaaaccagagtggaaaatttctgtacccagaaaatcacttagactcttggaaaagttgttactccataaagatgatccttcaagaaaaatctcctgtgttggtctagttagggtgactgtgctggccttctggatttcctctgaggactcaaaggacttcccagggaacactcactccggtcatcagagacaactgatgatgtgctgtgaaacccaagtcatggatggttaaaaaaaaatgtgaaaagcgaagtggaaagaaaaaagacatattgatcattgggcagactgagtgtctgagtatgctggacccagagccttccagagctctgagccctgtcagggaagatctctttgcctcgtattaaaatttaaaaggagactttttttcaagcgggtacagccttaggttcctgggtaggggggtctcgggcagcccctggtagtcccctgagagctacaacgaggatgtagcatcctctggtcctggacactgtctgcctggatcctggcctctgtttctgtcctggggaatcaggctgggctcccaggaggaagctggcttctctctgtctctctcctgtgggtaaagcagcttcttagagaacagaggcatatgtgctcgcttgccctctctctctctctgtgtgtgtgtgtgtgtgtgtgtgtgtgtctttcagtttttatcaaagttacacatgtctggagtttaaagagtcaaatatttccatagattttgttgtgggaaacagcagtactctttctctttgccccacattttctctctgcccaacccccacccacccaccggtcaccactcccagaagcagtacctttcatctcttttggcagattgtcttggtttgccatatctctacataatgtgcttgggttgcccatgacttggcttctcagcttcagcattatctgcaggctccaaagcctttgccattcgcattccacctccggccacctccctatcctctcattagtgttgtatcataaataattcacagccaagccataaagtaaaccatgattactttcctttcctgttttcactgtgtataatcattgtatgtatgtgtgcttaactgcactttgttttctatacatttgttactaattcaaccccagattcacgcctcacccaaatttcccctcaagacattggagatgttcagcagcacctgacgctctgtgcatcttgtcttgctgaggcaggggctccgctgagttgtctggtggctcctgactgccccggggctcccctctccatggtggtgcactctcatccagcgagctccctccacccactcccggaggtcctctctgcctcctgtgttgggtcttctctttccagaaccttgggtcttccttttccttggttttcatcctcatcttacagagaccatccttcagtgtggtcttcttcagagaagatgcatgagagggaaatactttgatccttcacatatctgaaaatgctggaaatgtctttattctattttgcagtagattgaaatctatcatagaattctggggtggaaatcattttccttcagtattgtcaagacattgctccattgccatctaacttcctgggttgctcttaaaagctccaagtccattctcagtcctgttgccttctttagggtcctgtcttaggatcttctctacaaccctagaacatgacgtctcacagtgatgggtcttggtgtgggtcagttttctcactcagtggctctttcagtctggtgaccctgggacttctgctttaagaaaatgtcttgagttctttgattatctcctctcctctgtttcttctctctctctggaactgctgttattcaggccttggccctcctatctgttttctctgattttcataccctctgtcacattttccattgctttgcctttttgctggattctctgagtacgtccctccatttttgtctccatccattctattgagttttttcttgttgttgttgttgttgttgtttgagatggagtcttgctctgttgccaagctggagtgcagtggcacgatctcggctcactgcagcctccacctcctagattcaagcaattctcctgcctcagcctcccgagtagctgggactacaggagcccgccaccatgccctgctaattttttgtattttgagtagagacagggtttcaccatgttagctaggctggtttcgatctccagacctcatgatctgccctcttcagcctcccaaggtggagtttttgatttctactgtcacattttcagttttcaagaatttttttttcttgaatgtccctttaatggcatcctgttcttgtttgatagactctactatcttatctctctaaggctattaacgttagttgttattaatgttacttggtgtttttggctttgttcttgttctgtttttaggtttttttcctgcgtggtttctgtttctctcaagtgcccctttattgtgtgtttatttggtctcgtttctcagacatctgatagcctttggtgtcttctcatgtttaagagtggaggggctcaaagatgattggaagtgatgagtgaggctctttgacggcgagttccccatagctgactgccggggctgtttcgtcggggagtcttcaacagtggtgcctttcttcttgagcagaatcaatccctatgaagactcagtctccctcttggttaaagggtctgcttcccatgttctggaagccgcaggaaaaagtcagggaggaggggaagaaggaggggtctctgcagccagtctgtatgcattgcattcacttcctccccactatttttttttttaatttttatctatttattttttttgagatggagtctctctatcgcccaggctggagtgcagtggcatgatcacagctcactgccacctccgcctcctgggttcaagaaattctcctgcctcagcctcctgagtagctgggattacaggtgcctgccaccatgcccagctaatttttgtatttttagtagagatgggatttcgccatgttggccaggctggtcttaaactcctgacttcaagtgatccgctcacttcagcctcccgaagtgctgggattacaagcataagccatgcgcccgacccccactatttctttatggcacccctgccatgccctcattgtgcctgacatcccccctcaaaagggctcagtttcaacttgtgcagagaagaaacctccaggctttctctggggtgggtggggggagagtctcctgagctgctggagttggggcggggatgggagtctgacagcttctaacaagactttccaccaatcgtccttaccttggttccctccaccccaacctgcagaggctttgagggatcctgggatgtaaatcagattggttcccagatttccctgctgcaggcttgggattctgtctcttccagtcattcatctctttccagcttccaaaagtttactgttagtctcctatcccattcccctcttccttgtaggtttattatacccaaaagaaaagaaagaaagaaagaaagagagagagagagagagagagagagagagagagagagagagaaagaaaggaaggaaggaaggaaggaaaagaaggaaagaaggaaagaaggaaggaaggaaggaaggaagggaagggaagggaggaaggagaaagagaggaaggaaggaagggaaggaaagggaaaagaaaaggaagaaagtttttcccactatctttaattaaagactgcctgtaaggtggtattcaaatatattttagccatgcagcccattcttccaaagaactcttcaagaaaggtcaccctctcagccccacccccagaccccaggagcctattggcacttccctgaacttctaggacttggaggcacaggtgggaacctgacagtgttgtagaaagtctttgggctttgaactgattcagagtcaaattctagcctcacttccagtaattactggccagttcctttgctctttgaaccttagtttcttcatctaaatagagataatgacacccgtttccagggtccttttgagaactaatagtaagataacatgggcttgtttatcccaggtccagcatacagaaagtatacaagtgttcagcaaagggagtcttccttcctccttcatagttctttccttccttccctcttctttcttccttgcctccactagcgtgattctgattttcttcaggctaaggtggtctttctgcccaaggaggagagagatgctgtctttgtgtgtctttggtggccatgtgtggacggcacatcatagaagagagaaaagtctgcaccaactctgtaaatgcattgacccatgcacagtaacaatgaaaactaaaatgcaaagtgaatatgggtcaggcatggtgcctcacacctgtaatcccagcactttgggagatcatggcaggtggatcccagcactttgggagaccatggcaggagtttgagaccagcctgggcaacgtggtaaagccttgtctctacaaaaaaaaaaaaaaaaattagctgggcatggtagtgtgtgcctatagtcccagctactcaggaggctgaggcaggagaattgcttgagcccaggaggtcaaggttgcagtaagccatgatcacatcactgcactccagcctgggtgacagtgataccctgtctcaaaaaaaaaaaagtgacatatggattgttggacagatggagtgtctgagaatggggttcagtgtgggtccacctgaattttcttagctgcaaatcacaagaacattttaccttttccatcttcgggcattgtttgaaatgaggtcttctgcagggagggaggtcatgtggtgtgagccgtggagctggagactttgtgtgaccctttctgggtcacagttttctcatttgcaattggaagatgtaagaatgaggcttgggctgtagagtctggaggactggggtttgagtcccagctgccattactagctctgcaattgctctttgtgagtttctcttccatgaaatgaatgattgccatgtggtttggatgaactatctctggcttgtccagatgtgaatgtgcagggtctttccagctctggaaacagcagagcttggcactaaatcctgggagctgctgctcagagagagtctaccgaaaaggcctgggtgagggagctatgcaggctccttcaagccttgtctccataaggaggaagctgatcttccttgaaggtcaaaggacctcatctgagcttgctgcaggatgcttcttattgggcaggaccgtggccgtgtaccctggtttgaggtgaggcatctgctgggaattctttccttccagagcccagagctgggtatcagcttgctggaacacctgcaggtgaggtgaggagcacaaaggagatgccaagtctccagagggtgctctggcctcagaggcctggatgagagagaaagcacctctctacccacagcctggagtctcttggaggaggggcctccgctgtggtgtatgaagaaaggagacccaacccagcagcttcagcagttccttgcagtccacggggtgaagtcctggccccgggaggcaatgaggtcctctgtgagtcggtgccagaggttttccagcctggccgcatcccaagggtgcatgaagctccagccacatcttccctgcttagtgtggctgagtgtctttccctgctctgtgggtggaggtgcttcttgggagtgctgggagtataaaatgaaatcagatgcatgaaacagttgcccagggcctggtactctgcccccaaccccgttgccagtcacagccaatgacctgcatccttgaagacctgccctctgagcatggcatgtgtcccagtttagcactaggtgacaacagcacacctgggttcaaatcctggccctgcgcctcacacaaaagttgtttaacctctctggctcagtcttctcatctagaaaatgagaataatcatagtgctgtgtctcaaagttgttgcagattaagtgaaatggcatttgtgtgtaatgtacttggcatgtagaaagttgacctctttttctgaattatcaatatttacttctctgattgcctcttcaggcaaataataaattccggatagtgccaccccctgcccccattacttttcagcagagtataaactctgaactggaccacctgcatgaaaatctagaatctctgagtggctgcctgagcataagttatgtaactgctctgtgccttggtttcccagtctgtaagatggagataacagtactgtgattatatcttagagggttggtatgagaattaaccaagatgctacctatgaagtactcacggtacgtggcacatagtaagtgcttcataaaactcagctgttattattagaaaagaatcctcagaaatcacttaatcgtaattcctcatttgccagtaaggaaactgtagcccagggaggcattaacatggcatgttaatgatggaagccagcatcttgacccccgcttagtatatgccaacaggaggaaggaagtaggaggcaacatgtgataagtgtacacaaaagcatgtgccatccttccatggctgtcttgatggcaaggagatggtgtggtggtgggatcaggttggaaacctaatgtgccttcggctcccttgcagagggatattcagccccagaggattccaagcaggttgagaggggcatccctccgtggagacagatcctgagcaaaggaggaaagtgtcctgccagggaggcctggggtggcctcggctataggaaatacacactgatgaattcaggggaaatggacattgggttgcaacttgctctcagatggttcaggataaaaatgttcctgtatgtttgtgatgtttctaaataaaaaccttaaatgataatacagcacgactcagaagaagggggaccagggaagccaggaattgagggaagactttaaaagagacagagggcattgggagccagccaggcagacttctggacaagtggagtctgctgaggccaggagaggtggtgaaaggccttggaccaaaggaggcagcggggccaaagctccaagcggaattttggatctgtgctatggatggggtcatctgttgacatgagtggctggcaggcccaagatggacaggcccagctgtcaagagagtcaagggaggtgtgtgctggggcccagcagccagcagaagacagagcagtcttggagtggggcagcatggagtgggacaggcttactgggcaggcaggctcccaagaatgtggtgacagctgacagggctgcacatgagagccaaaaagagcctacggcagccagggagaagccaggctatgggttaggccttgtgaccagctggcaggtgcagttggcagactgggccaaatgtggccagccagggggctggacaaagtttttagagactagagccaagggtaggctgggcacctcccctgcatccccagggaaagtgacaaggaatggaggcagctgacaagggcctggaggccgagggaagctcctctgcaatgtgagcattattcagcctgaatcccagggtggagtcttcaggggccatgttcccccaagagcaggccaggaggggtgcaggctgacacaaaaggaagaggagctaccctgtcacaaagaggaggagtcaagctcctacaaactttcagaatgtcagcagatctagcatctaggcttccccaaatcctcatctccccagggctcccctcagaagtttctggggctgtgtagctggcgagctcaggaccaggctctaagctctgtgattttcctgagggttgtagcttacgccagtctaaccatgagacacctggatgggaatcaagttctaggtccagagcaggaaggtccaggagtgaggaggtggctgggctccaacaggctctgcagataggactggccgtccagcatagggcatgctccaatgttcccaatgctgcctgggccggggggcatcatccctctcctgaggactcacagggaggaggtggggcacctgagaggccactccctcccctttcacttaggaggaaatgggggcccaggaaagaaataggtgcctcagttgccagagtgcccagttcaatcccagctctgccacttactgttcgctgggcacattcctccacctccgtgtagctccatttgttcgtctgtaagctgggagagaacagcgcctacctcactactgtgaggccactgtgaggcttgcagggcttgttttctcagtgcaagtgaggagccctcgctgggtgggggttctcgccatgcctcaccaagcgctggctgtgaatctctccccagtggcaaagccaaaccctggggtcaccgttgaaacaagatcttactctttgtcctttattctctttcttccccaaaaccactgggtcagctgacctgggtgcccggcacaccctctgtaatagatgggagaagtcaagccctctggggctgcccctctgccccccacccctggagagagacgaggctctgggccccacaggttgggttccctgcccatcactcctcaacctcaccaccccactccctgccatccccccaaaggtgactccaggctggttgcttccttccagagcctgcgccttcattccccaatgcctttgcacactctatccctctgtgcaggtgcccctaccccattttctacctagtaaactcttcaaagcccagtgcagtgttttcaccctctgggaaactgccctcatctccctccgcacccatacccacccctccatcagagtcaacctgcccacctctgtgtccctctgaacttgtgcattctgtcatcaaacacactgctgttttgttcagccagcagtttatccagccacctcctcccagggtgtcactccttaaaggcagggaccagagcggattggtcttggtccctaatacctagcacatgacacagatgccatagatagtttacttttcattcatcaaatattaattgggtgccaactgttgtaggtgttgggggtataacagtgaacaagcagatgaaaagcaagggaccttgaaccaccaaaacaatcttgcaagaggacaatgttgcagctctcacacttcctgatttcaaaacttactacaaaaatacagtaattgaaacagtgtggtactgacacaagacagaaatatagttcagtggaatacaacagagagcccagaaataaaccctagcaaatatggtcaaatgattttcagcaaggttgccaaggctattcaatggggaaagaaagtctttccaaggaatgatgcaaaagcagaatatccacatgcaaaaggtgaagttggactcataccttacaccatatacagaaatgaactcaaaatggatcaaagacctaaaggtgagagctaaaactataataaaactcttaggagaaaacataagggaagaacttcatgaaattggatttggcaatgatttcttggatacaacaccaagcataggcaacaaaagaaaaaatagataagtttggacttcatcaaaatttaaaacttttattcattaaaggacactatcaacagaatgaaaaggcaaccctgggaatgggagaaaatatttgcaaatcatatatttgataagggcttgatatccagaatatgtaaagaactcctacaactcaacaacaacaacctcaatccaaaaacccaattttaaaaatagccaaaaagcatgaatggacatttctccaaacaagatatacaaatggccaatcatcacatgaaaagacattcaacctcactaatcatgagggaaataaaagtccaaactacaatgagatactacttcacaccctctaggagggctattatcaaaaacatggaaaataagtgttgagaaggatgtggagaaattggaacctttgtacactgctggtgggagcgtgaaatggtgcagccgctgcgaaaaacggtatggtagttcttcaaaaatcacaaacatagaattaccatatgatctagcaattccacatccaagtacataccaccaataccgaaatcaggaactcagatatttgtacacctgtgttcagcagcattattcacaatagtcaaaagctggaagcaaccccagtgtccactgatggataaacagataaacaaaatacgttctagtcatgcaatgaaataccactcaaccttaacatggaaggacattctgatacctgccacatgtggatgaaccttgaggacaccatgctgcgtgaactaagccagtcacgaaaaaggacagatactgtatgatttcactgatatggggtacatagactagtcgtatccatagatagaaaggagagtggtggatgccaggtcttggaggaaggaggagatggggagtgagtgtttaacagatacaaagtttccgtttggaaaatggaaatttttctggagctggacagtcgtggagctggatggtggtaatggttgcacaacaatgtgaatgtacttaataccactgaactgcacacttaaaaatggttcagggcagttccaagatggccaaataggaacagctgtggtctgcagctcccagcgtgatcgacgcagaagacgggtgatttctgcatttccaactgaggtacctggttcatctcattgggactggttggagagtgggtgcagcccatggagggcgagctgaagcagggcagggcatcgcctcacccgggaagtgcaaggggtcaggggatttccctttcctagccaagggaagccatgacagactgtacgtggaaaatcggaacactgccgcccaaatattgtgcttttccaatggtcttagcaaacggcacaccaggacattatattctgcgcctggctcagcaggtcccatgcccacagagccttgctcactgctaatgcagcagtctgagatcaacctgcaaggcagcagcctggcagggggaggggcatccaccattgctgaggcttgagtaggtaaacaaagcaactggggaagctcaaactgggtggagtccacaacagttcagcaaggcctgttgcctctgtagattccacctctgggggcagggcatagctgaacaaaaggcagcagaaacttctgcagacttaagcgtccctgtctgacagctctgaagagagcagtggttctcccagcatggtgtttgagctccgagaacagacagactgcctcctcaagtgggttcttgacccccgtgtagcctaactgggagacacctcccagtaggggccgactatcacctcatacaggcgggtgtccctctgggatgaagcttccagaggtaggatcaggcagcaatatttgctgttctgcagcctctgctggtaatacccaggcagacagggtctggagtggacctccagcaaactccaacagacctgcagctgagggacctgactgttagaaggaaaactaacaaacagaaaggaatagcatcaacatcaacaaaaaggacatcaacaccacaaccccatctgtacatcaccatcatcaaagaccaaaggtagataaaacaacaaagatggggaaaagccagagtagaaaagctgaaaattctaaagatcagagtgcctcttctcctccaaaggatcgcagctccttgccagcaaaggaaaaaagctggatggagaataactttgacaagctgacagaagtaagcttcagaaggtcggtaataacaaacttctctgagctaaaggagaatgttcgaacccatcgcaaggaagctaaaaaccttgaaaaaagattagacgaatggctaactaggataaacagtgtagagaagaccttaaatgacctgttggagctgaaaaccatggcacaagaactacgtgacgcatgcacaagcttcaatagccaatggaagaaagggtatcagtgattgaagatcaaattaatgaaaaaagtgagaagagcagtttagagaaaaaagagtaaaaagaaatgaacaaagcctccaaaaaatatgggactatgtgaaaagaccaaatctacatttgattggtgtacttgaaagtgacagggagaatggaaacaagttggaaaacactcttcaggatattatccaggagaacttccccaacctagcaaggcagggccaacattcaaattcaggaaatacagagaacaccacaaagatactccttgaaaagagcaaccccaagacacacaatttgataattcaccaagcttgaaatgaaggaaaaaatattaagggcagccagagagaaaggtcaggttacccgcaaagggaagcctatcagactaacagtggatctctcggcagaaaccctacaagccagaagagagtgggggccaatattcaacattcttaaagaaaagaattttcaacccagaatttcatatccaaaccaaacttcataagtgaaggagaaataaaatcctttacagacaagcaaatgctgagagattttttcaccaccaggactgccttacaagagctcctgaaggaagcactaaacatggaaaggaacaaccagtaccagccactgcaaaaacatgccagattgtaaagaccatcgatgctaggaagaaactgcatcaactaacaggcaaaataaccagctaatatcataatgacaggatcaaattcacacataacaatattaaccttaaatgtaaatgggctaaatgccccaattaaaagacacagactgtcaatttggataaagagtcaagacccatcagtgtgctgtattcaggagaccaatctcatgtgcagagacacacataggctcaaaataaagggatgaaggaagatctaccaagtaaatggaaagcgaaaaaaaagcaggggttgcaatcctagtctctgataaaacagactttaaaccaacaaagatcaaaagagacaaagaaggccattacataatggtaaagggatcaattcaacaagaagagctaactatcctaaatatatatgcacccaatacaggagcaaccagattcataaagcaagtccttagagacctacaaagagacttagactccctcacaataataatgagagactttaactccccactgtcaatactagacagatcaacaatacagaaggttaacaaggatatccaggacgtgaactcaggtctgcaccaagcggacctaatagacatctacagaactctccatcccaaatcaacagcatatacattcttctcagcaccacatagcacttattccaaaattgaccacatagttggaagtaaagcactcctcagcaaatgtaaaagaacagaaatcacaacaaactgcctctcagaccacagtgcaatcaaattagaactcagcattaagaaactcactcaatgattgccattctaactggtgtgagttcagggatctagaactagaaataccatttgacccagccatcccattactgggtatatacccaaaggactataaatcatgctgctataaagacacatgcacacgtatgtttattgtagcattattcacaatagcaaagacttggaaccaacccaaatgtccaacaatgatagactggattaagaaaatgtggcacatatacaccatggaatactatgcagccataaaaaatgatgagttcatgtcctttgtagggacatggatgaaattggaaatcatcattctcagtaaactattgcaagaacaaaaaaccaaacaccgcatattctcactcataggtgggaattgaacaatgagaatacatggacacaggaaagggaacatcacactctggggactgttgtggggtggggggaggggggagggatagcattgggagatatacctaatgctagatgacgagttagtgggtgcaacgcaccagcatggcacatgtatacatatgtaactaacctgcacgttgtgcacatgtaccctaaaacttaaagtataataataatgaaaaaataaataaataaataaactcattcaaaaccgcacaactacatggaaattgaacaacctgctcctgaatgactactgcataaataacgaaatgaaggcagaaataaagatgttatttgaaaccaatgagaacaaagacacaatgtaccaggacctctgggacacatttaaagcagtgtgtagagggaaatttatagcactaaatgcctacaagagaaagcagaaaagatctaaaatcgacaccctaacatcacaattaaaagaactagagaagcaagagcaaacaaattcaaaagctagcagaaggcaagaaatagctaagatcagagcagaactgaaagagatagagacacacaaaaactcttcagaaaaaatcaatgaatccaggacctggtgtttttaaaagatcaacaaaattgatagaccattagcaagactcctaaagaagaaaaaagagaagaatcaaatagacgcaataaaaaatgataaaggggatatcaccactgatcccacagaaaaacaaactaccatcagagaatactataaacatctctatgcaaataaactagaaaatctagaagaaatggataaattcctggacacatacaccctcccaagactaaaccaggaagaaactgaatctctgaagagaccaataacaggctctgaaattgaggcaataattaatagcctaccaaccaaaaacagtccaggaccagatggattcacagcccaattctaccagaggtacaaagaggagctggaaccactgcttcttaaacgattccaagcaatagaaaaagaaggaatcctccctaactcattctatgagaccaacatcatcctgataccaaagcctggaagagacacaacaaaaaaaaagagaattttagaccaatatccctgatgaacatcgatgtaaaaatcctcaataaaatactggcaaactgaatccagcagcacatcaaaaagcttatccaccacgatcaacgtggcttcatccctgggacgcaaggatggttcaacatacacaaatcaataaatataatccatcacataaacagaaccatcgacaaaaaccacatgattatctcaatagatgcagaaaaggccttcaacaaaattcaacagcacttcatgctaaaaactctcaataaactaggtattgatggaacatatctcaaaataataagagctatttatgacaaacccacagccaatatcatacagaataggcaaaaactggaagcattccctttgaaaactggcacaagacagggatgccctctctcaccactcctattcaacatagtgttggaagttctggccagggcaatcaggcaagagaaagaaataaagggtattcaattagaaaaagaggaagtcaaattgtccctgtttgcagatgacatggttgtatatttagaaaaccccatcatctcagcccaaaatctccttaagctgataagcaacttcagcaaagtctcaggatacaacatcaatgtgcaaaaatcacaagcattcctatacaccaataacagacaaacagagagccaaatcatgagtgaactcccattcacaattgctacaaagagaataaaatacctaggaatccaacctacaagggatgtgaaggacctcttcaaggagacctacaaagaaaccactgctcaatgaaataaaacaggacacaaacaaatggaagaccatttcatgctcatggataggaagaatcaatattgtgaaaatggccatactgcccaaggtaatttatagattcaatgccatccccatcaagctaccaatgactttcttcacagaattggaaaaaactaaagttcatatagaaccaaaaaaaagcccgcactgccaagtcaatcctaagcaaaaagaacaaagctggaggcatcacactacctgacttcaaagtatactacaaggctacggtaaccaaaacagcatggtactagtactaaaacagaaatatagaccaatggagcagaacagaagcctcagaaataacaccacacatctacaaccatctgatctttgacaaacatgacaaaaacaagaaatggggaaaggattcccttttttaataaatggtgctgggaaaactggctagccctatgtagaaagctgaaactggatcccttccttacaccttatacaaaaattaattcaagatggattaaagacttaaatgttagacttaaaaccataaaaaccctagaagaaaacctaggcaataccattcaggacataggcatgggcaaggacttcatgtctaaaacaccaaaagcaatggcaacaaaagccaaaatagacaaatgggatctaattaaactaaagagcttctgcacggcaaaagaaactaccatcagagtgaacaggcaacctacaaaattggagaaaatttttacaatctaccaatctgacaaagggctaacatccagaatctacaaagaacttaaacaaatttacaagaaaaaaacaaacaaccccatcaaaaagtgggcaaacaatatgaacagacacttctcaaaagaagacatttatgcagccaacagacacatgagaaaatgctcatcatcactggtcatcagagaaatgcaaatcaaaaccacaatgagataccatctcacaccagttagaatggctatcattaaaaagtgaggaaacaacagatgctggagaggatgtggagaaataggaacacttttacactgttggtgggggtgtaaactagttcaaccattgtggaagagagtgtggtaattcctcaaagatctagaattagaaataccatttgatccaggaatcccattactgggtatatacccaaaggattataaatcatgctactataaagacacatgcacacatatgtttattgtggcattattcacaatagcaaagacttggaaccaactcaaatgcccatcaatgatagactggattaagaaaatgtggcacatatacaccatggaatactatgtacccatagaaaaggatgagttcatgtcctttgtggggacatggatgcagctggaaaccatcattctgagcaaactatcacaaggacagagaacgaaataccgcatgttctcactcataggtgggaattgaacaatgaacacattggacacaggatggggaacatcacaccccggggcctgttggggggtggggggcagggggagggatagcattagggatagcattaccttatgtaaatgactagttaatgggtgcagcaaaccagcatggcacatgtatacttatgtaacaaacctgcacttagtgtacatgtaccctagaacttaaagtataataaaataaaataaaataaaataatgagttggaaaataaaaagtttcaagggctgggcgcagtggtgcacacctgtaatcccagcactttgggaggctgaggtggggtggatcacctgaggtcaggagttcgagaccagcctggccaacatggtaaaaccccgtctttactaaaaatacaaaaaattggccagcatggtggcacacacctgtaataccagctacccaggaggctgaggcaggagaatcacttgaacctgggaggtggaggttgcaatgagccgatatcgggccactatactccagcctgggcaacaagagcaaaactcggtctcaaaaaaaaaacaaacccaaaatggttcaagtggtacattttaggttgtgtatttgttaccacaattttaaaaagagttgcttaaaaaagtgcagtatgagcagcttggagcccagacagacacacaaagctgaggttgcagagcacctggaggaagctggcaggacaggatgaaggcaggagtggctgggagccaagagcgcaggcatgtggtcatgggcaagttacttaatgcccctgtgaatccctttctcatctgcagggtggggagagtgatcgctaccacagcatgtgtcattctaaggactgcatggtgcttgggacatgtcaatgctcaacacacacatacacacattagcttgtctgagtcctgcagcccagttctggcacctcctggactgctttgcacatgaggccattgaatgggagggtcacagaaggctcagaaagcacctctgaggacctggcattcgagctgaggtctgaggattggggcagttaacaaaggcatggggatggaaggggagggaggattgttccatctggaggaactggcagggtcaaaggtcggaggctggacagagcattagcaccgtgcaggaaaggggtgctagggaggctggagtgggggatggccagagaggaggggaagcagtgggcagcctgggaggggcctgggagcccatggtcaggtggaaggtgtccgtggagtgtggaggaaaggatatctgcttcttttccatcaaatggaagaggccacatcactcatctcacttttgtgaggggagagtggcaatgaatacatgaaaattattgtcaattattgtaaattataaatgctctgtgggcttttttaaataaatccccaaagcctggtattgctataactctgccacatggttggccctaacgcctggcccagcaggagtctgtgctggtccccaggtccctccagagtgccggaggctgccttggccccaggccacctcctcgggctcctcgctctaccagccaagccattccctcggtggatcccaagcatccctgcctctgtgcctttgctcctgccatcccctccacctgcagggccatttccccttcttcatcttcaaagcccaggccaggcacccccattccctggagcctccctggccctccccaaccctgccactgcctgcttgtcaacagctatccttccaaacccccagaccgactgattattttcccttagcttgacttttactattttctgtttgcttcaggcaaactatgcttcttctgctggccatcttttgagcccacaggcagggaaggtacagttaataaaatccgtagatgctttaaaacatggaagtttaaatccgcaagcctgggcaggatgatcttcagtgtgatatggtgtcacctcctactagctgtgtggctgagggcaagtcactgtgcctctcttagctcagtgtccacatctgcagaatagggacagctctctctacctcacagggctgtcatgaaaagccaggagactagaggacacttcagcacctcccaccactcccgatgagcactgcgtagatctgcagtcagtgtgagcaagtgctgttctctttctgtcatttggaatgactgcatctgggcttgattctagtcacagggctgcctcctggctgatggcttctctgaaaggcactacacgtgctttaagtagtatttgcaagtgacactgcatccaggccgggccagtgctgctggagagctgcctacaagctttctggagacaatgcattgatccatttctttactgggcaccaggcctgatgcagggaggcatgtaaggagtgagtggtcatctgtagcaaggccacacccagttacatcagccctgcttcaagaagcagaagtctaggtttgtagtcttggctctgctgccaatggctgtgtgaccttgggcaaggcctttgtctgctctggtcatcagccaatttgctgactctacaaggcctcacagcttcaggagatgagcacaggtccctccacacctgggggctcctcacttagaaacttcctggcatgtctgttctgagaatgatgccaggtcctctggacagctgcatctgttctgtctcgggaacccttctctgtcagctctgagcctgctgagaagagcactccttgcttttctgtgccctgaatttcccactctcaggccatgaagggagctgattcgagcacagattggggtagagagaggcagctcctgggagacttgagccccccgccttctccactacagtcctcactttgcacactcaggagggacctcgaacaacttcacctctggggaccactggttgaggtgcagcacgtggtccccagggactgagcctgttccagctgtagtcacccgccctgctgcccaccctccaccccatctgcagtcactgttgactgaaggacttacatgctccaggcacagaagtaagcactaaactcagaggggccatggtcactcaggttgtaaggagcagagctgggattcacactcagccgtgtttggcttcaaagcctgtgtcctttccttcacacctcactgccattaactgggagccctactttctgcattttccaactgtcagctttctgcatggcaaggctctggtgagaccctgttactgttcctctctgtgactagggccaggactggaatgtccagtgaatgctgaggatggtagtggtggtggtggtggtggtgatggtggtgatggtggtggtggtggtggtggtgatggtagtggtggtggtggcagtggtgatggtggtgatggtagtggtattggtggtggtggtggtggtggtgatggtggtgatggtggtggtggtggctgtggcaggggtggtagtggtggtgatggtggtgatggtggtggtgatggtagtggtggtgatggtggtggtggtggtgatggtgatggtggtggtggtggtgatggtagtgatggtgatggtggtggtggtgatggtagtggtgatggtagcgatggtggtagtggtggtgatgctggtggtagtggtgttggtggtggtggtgatggtagcaatggtggtagaggtggtggtggtggtgattgtagcgatggtggtggtattggtggtagtggtattggtggtggtggtggtagtggtggtggtggtgatggtggcgatgatggtggtggtgatagtggtgatggtggcgatggtagcgatggtggtagaggtggtgatggtggtggtggtagtgatggtggtggtagtggtggtagtggtattggtggtggtggtgatggtagcgatggtggtggtggcgatagtggtggtggtggtgttggtgatggtggtaatggtagcgatggtggtagaggtggtgttggtggtgatggtggtagtggtgatcatggtagtggtggtggtggtgatggtagcgatggtacaggtggtgatgttggtggtggtggtagtgatggtggtggtagtggtagtgatagtggtggtggtggtggtggtggtgatggtggtggtacaggtggtgatagtggtggtggtgatggtggtggtagaggtggtgatggtggtagtggtgatgatggtagtggtggtggtggtgatggtagcgatggtagaggtggtgatgttggtggtggtggtagtgatggtggtggtagtggtattggtggtggtggtggtggtagtggtggtggtggtgatggtagcgatggtggtggcggtgatagtggtggtggtggtgatggtagcgatggtggtagaggtggtgatggtggtggtggtagtagtgatggtggtggtagaggtggtggtggtggtggtggtcatggtggtggtagaggtggtgatggtggtgctcctgccacggtggtggtagaggtgatggtggtggtgctgatgctggtggtagaggtggtagtggtggtggtgatcatggtggtggtagaggtggtgatagtggtggtggtgatggtggtggtacaggtggtgctggtggtggtggtggtgatggtggtggtagaggtggtgatggtggtggtggtggtcatggtggtggtagaggtggtagtggtggtggtggtgatggtggtggtagaggtggtagtggtggtggtgatggtggtggtagaggtggtagtggtggtggtggtggtgatggtggtggtagagctgctgatggtgcgtgctggtcggtcatgcgtggtggcagaggtggtagtggtggtggtgctcatggtggtggtacagctggtagtggtggtggtcatggtgctggtacaggctggtagtggtggtggtggtggtggtggtggtggtggtagtnnnnnnnnnnnnnnnnnnnnnnnnnnnnnnnnnnnnnnnnnnnnnnnnnnnnnnnnnnnnnnnnnnnnnnnnnnnnnnnnnnnnnnnnnnnnnnnnnnnnnnnnnnnnnnnnnnnnnnnnnnnnnnnnnnnnnnnnnnnnnnnnnnnnnnnnnnnnnnnnnnnnnnnnnnnnnnnnnnnnnnnnnnnnnnnnnnnnnnnnnnnnnnnnnnnnnnnnnnnnnnnnnnnnnnnnnnnnnnnnnnnnnnnnnnnnnnnnnnnnnnnnnnnnnnnnnnnnnnnnnnnnnnnnnnnnnnnnnnnnnnnnnnnnnnnnnnnnnnnnnnnnnnnnnnnnnnnnnnnnnnnnnnnnnnnnnnnnnnnnnnnnnnnnnnnnnnnnnnnnnnnnnnnnnnnnnnnnnnnnnnnnnnnnnnnnnnnnnnnnnnnnnnnnnnnnnnnnnnnnnnnnnnnntccttcaaagagggggattggtgcccttcttttcctgcccactggttgtgtgacctcaggcaagtgactttacctctctgaacctccatttcctcactttgaaaaagaggactgacataacccccctcactggtttctagtaaggatgaggaggtcctggagtgaggagaatgcactgtagtgctagaggatcacagatgttcgtttgtgttcttgcggctgctgctgtctatcccatgcagaaaatggctgagcagtgtggggtccagttagccacgaggtacaggcataccttggggctggagagacgttcctcttcatcttgatcataaaggtggcatggtgctctgatcaataaaggtgttgcttcctactccaacagaagataaagacgaccctttggtggctgtgtcaggacctgtaaaatcctttatggcttgcagcaccaggaggagcccttatgactggaatgaacaacagcaaggccaccagctccaagatatgaaggcctgaggagaacagcatgacaaagactgagcaggagattggaccattgtaggaggtgctgatcccagtcaacgaaaaactttcaacacggcgaagaagcatctccacttcccctgcgcttacattggaggagaccaaagagccacgtctatagcagcctccacctcatttccctattctgatcttgctttctcgtttccagcatctgggttgtggtcaggttcactgtgcagctctcaagagggtctagccccagtctcaatatggatacaccaggaaggacctaaataaggagcccccaggtgttgaggggtctatgctcaccccctggagctatgaggccttgtagagtcagtgaggtggctggagaccagagagggcaagggcctgggcctaggttacacagccagttacccacatgtgactgggaagagacaaagtgttctctgctaactggttaccacctcctttaatctctgacaagttttcatagaaatggctttcctgagggatagccgggccagcagtgacaactctcacagtctgatctttacatacaagctctggaagcttttcagaaccacatttttcaccctgcctacctccgtgaaaaccatctgtccatctgtcatgctaagaactgcccaaaccattaagtactttgaactgaagggaagatgagacaggatcagcaggcaggagcaggagctgaatcacgccagctcgtggctgtgccttgactcctcgaccccactttctgctggtgaggacactaatttggcccccactttgagtggtcagacatttaaggcagcgggtaggtgaggggctacttacagatctatagtgcgcatggtccagcctaccatctcaccaagggattcctgcttcatgtttgtcaagtgcagataagcaaacccctttattcttcatcttggagtttcttctaaacatgtcacccattttgcgcctccgttatcccgatagaaacctaacagttaggttaactttcctgaggcttttattgccccctgcgtattgttaatctggaccatgatcctgcatcccactgatagccattttaaaagtggaagagtggttcaagctccgtgtcatacggatcatgtgtcataggaggaactgaagcctgctcttcagcactgtattcagtgtcaaagtttggaagctgaaatgcttcacattccatgttggcggctctgtcttcatccctggaatttgttccctgccatcatccccttgcactgcctctgcctctgcaggatactgtggctctgtgacgatgtttctgtctgcatcctctctttcctctacatcctcgtcaccttcatcatcttcctcttcctcatgctgctcctcttctacttcatcggaatattgaccttcctggggacaagactctcatcaggagagatgggcacaaaggaatcttctctgtgaggagcttcctgcgcctcggaccccatcctggcatgagtgtggtcatttccatcatcctccagcgggggggtcctgggaagttcatggtccccttggctgtgatcttggagagcttccaagggcttctgtatccccatcagcatgttatggattcctccgcaaacctggccatggctggagagaaggaggagatggtagagagactccatcgtgacttcttactccatcaactggtcccaatattgccagggctagacagttgagccagcctcttagcacgaaaccattagcttcgcttttgaggtgggtgagggagacatctccaggcttctgaacctattgaaatctggggcacttggttttccttccactattgaagaatgaatctgactgtaatgagtgctatcaaggcagagtgccagatacagcaaatactgattgagccccactcggtgctaggcactcttccaagcacataacctatattaactaagtaaaatgtgcaacacctcttggagcatatgctattattttgtagtaattttctaattgaaacagatcatacatacaaaaaacaatccaagtcataagtatacaaccatgagttattacagagtgaacatacctatggaattgtgcccagttacccacaggtcaagaaataggacattatccctattttacagatgaagaaactgaggcacagagaggttaagtaacctgcccaaggtcacacagctaataagggacagaggctggtttccgcctcaggagttctgtctggtaagcccagctctgttttctactgcccatagaaaaggtggacctggagagcatgacccatctcagggtcaggggaagcttctgagaagctggggttggatctgagctcaggggagaactggagcttcatcagaaagagggaaggagagcattccaggcagggtgatctgctgagaggcctgcagatctgctgtggggattcaggagggaggcgatgtggacagcctgtcacggccacaacacacagactcaccagtcactggagggcagccatggggctcacaaagggattcttccttccacaaaagggctcacaacaggcatccctaaatagctcgctgcaaggaaaacccactttgagttgggaaagtcacatttccatagagtggattagagaaatagggctttcattggaagaggtggctcagtctgagaataacagctgggaggtgtaatagtaaaaccatcccacagccacagccatagctggtctcctctgggcagcatcagcacaccctccatgggcgggtgcttgctcaggatcacacagctggtcggaggaggcaggatttgaactcggcagtctgatgcatcaacaccccatgcctaaccactgcactcgcagcgtcctaatcagacaggccacctcagtcctctgagccgtgaccacaccctcccttccttcctgttttcccacccactcacctactggctgtttatgtctggagcaccagtgtggttgcagtgtccatttagagtccagctaaacccactggacctggagtccagcccagctcctaccattagaatctattttgccccagacttacattgtcatttaatctgggcttgaatactagacctgttggggagctcactaccattcaggcttgcttttttccaagtttgtagccctggggtcagaaaactctttcttaaagggagcccggatcttcctccatgcctggttctgccttttggctgagctacctcccaggaggctgagacagtggtcacagatatgacctgaggtgtccaaagacaggttttccttggtccctgtttctcctgtaatcttaactggtggggaacagatctgcttggggtatggggtaagaaggtgcctgttgtcatgcagaaattagaatgccttctctatccgtctcctttccagattggagtaactctggggtctgagcatgtatcctcccccacgccccaacccagtgttcttcaggtttaatctgtaaggacagctgcaagagatgccaaccaactgccttcatgagccctggctaccttgccccattcagatagatcaaaaactgtttcacggccttcatggtgctgacaccttgagctcattgcaggatttaaaactgttcacagccttttcttacctaatgtgtacctcagcatatgtgtgtttctgtgcagccaggaacaccgaggtctcaggttgtagtagcccagcgttggccaggcacctggtgtacgcatagtgtcagctgctactagagagagccttggtcagtgtcctctctggctgctgccccgcacagccccaatggggggcttccagctgcagctccgcaggtcccacctctgacagtacacctttcctttcctctccttcaccacctgtaagacgctggctgaattttagagccgggcactgaggcttttctaagccagtctccaactggcctttctgcctcaatacctgctattcgtactcagcactgtcatcatagaattgtaccaaggtttctacgatataatttctgtaaaaagtgcctactacagagtcagcacttaacaaattgtagctgtttatttttatgtgatgaaaggtttcacctatgaccctggttgactttttttagcggtttttagcaaaaataataatgagaagaagaagtgttcataaatgttaaccaagaagaaaggagatatcctacggaaagcgtgtggcacatagcgagggcctggtcactgtgaggtcaggtggtctggggaggcctcagccctcccagctctggccatttgtgtggtgtggagcaccagacaggctcccgcctcttcagggtctagttagtgacttccccattctgggtctgggacataagggagtgaggctggaatagtggaaagaggagaccatggtcctgcatcggcctgggctaggtccagccccacctgagggcttctgtgctctgggccattctgggagaagatggacagtttggggagaatttctcacatgtggaattgtttgaggacatggaaatgctgagactggaggaaagaagtctcgagcagcatcatggcttttggagacttgtgtgaaggaggagctggactgcccagagctcagagcatgggtgtgagcacaggttgacaacttcagcttaatagtgagagagctgcccagaagtcgcaggagctgctgggaaactgtgagtcccctggtgccggaggaatatgcacctgtgggagggtgtggacgggatccacctgaaaatggcctaatccaaggatgcagcaggcttctctgcatcagaggttttaaggaacttccaagcatgaatgttctctaacagtaattttcaaattgtttttacattcacataactcctttttacaaagttcagtttacatacatactcactctgaaaaccaacgcaatccagagctgctgtgggtgggggaggaggacccagggccccactgctcggcttccccacccccatgccccatgaatccggagcacagattggaagtcactgttctagaaccctgcaggccagggctgctcatggctggagcaactccacctaatgttcgcagtgaaggcatccactcctctgacagtttcatttcatttcaacccagcttctgggttcctgcctgcctccctaaccccactatctggtcagaaatggggtatcggctgtgtttgacagacccaagctggcttcagcccaggcttggtgcctgcttgctggctcttaggcctctgctcttcgtcacccagaagtcactccacaggacctccacctatcatatccaattctgtagaataaaggcgtttgctattcttagagctgtgctgggcattagacccctgagctgctgccatcttcccagctgctgccactgggagctgatgttttcctagtattaaaaaaatcacaatagtaaaacccaggaaatggtgaaaatgccactgtaggtagcaagcctgcaaaatgacaagagcttgcctcatcagcaagaatccttctggaaggtgtataagaaggcatccttgacccactctcccctcttatttctgtcgggccactgctgaactgtctcatatctaggtcctctttcctcttgccctcgcctctgtccagctgggctctctacagtcacaatagcctctcctggcctccagacctccccacccacaccatcctccacactgcactcaggcggagactcataaaacaggagtctcaggtctgaccctgtgcacccaaaaagtctcagacaaaggtgtttcttctgcagaagccacctgacacccacccccactggttcctcctctcatcatccgtagcactttgctcattgtctgtattactgtttccatctctttgctttacgatcttttaagtgcctgttagtcacacttgagaccaaggtcagggttttatttagctttatatttctggccctggcccagcgccaggctcagaccagaccttaggaaatactgttgagtaaattcacatgcttgcagctcacgtcgctgtttagaacagagactgtgctggtgggctctgtgcctgcgtgccgtggaattcctggcacagtggcctgtccctgagggtgcacctaatggcccccagcctgagcgttatgacatgatgtagtttctgcagaaccccaacaaaaggagaatctggggtgtacccagaaaccagtgtgaactttccccatgacccacatggcctccccagtttactttccaccaggggatgtgtctactacctcttggccactgaatatttttaagagagacacagctcagcaggctgtaccacctggcactttcctctctttccacagacatccattcttctgtgagtttcactcgaagagcagcgtgtcactgcggacaagccagccagctcaccatggctggacctcccagggtaccagacctctgggaactggccctgagcctcacttcacggacacaggctgcccgccaaagtgggtctcagagcaacagtgtgtgcattgctcgtcacatcttcctcttgctttgcatgactgactacacccaagaagtgtgccccctgggaggaaagcatatttggcaaccagatcataataaaatcagaaatgcagcaaacctttaaaatatccagacttggaagagatgcaagagttttctaattaaatatgaataataggtggaaaagtcataatataaatgcagaatagcttaatacatagaatctcagattaagaaggtaacttggaggccattgagttcatcccttcatttcagaaaataatgcagcttggtggagagaaaagtcacgggcttgaaggtcagacatgcccctattgactagctatatgaccttggggaaattactttgagccagaagtttagctccaggctggatccgcctcttgtattttatttgacttacacagtgttttttaaaaaacagaattgcacagcagttaagcacatgaaccttgtagccaggtgacctgagttcaaattctgactccattaactggctgtgtgaccttgggcaggttatttaacctctctgggactgttttctcctgtgtaaatgggaatcatgacagccccatcacatagggctgtcatgtgatttaatgaggtaatgcatgtaaagcatttaaaatcgtgcttggcacccagtgtaagagtttgctaatatttttagtttttttttaaaaatctgaatctgtggtttcattgaaaaaactggaagatgtaacaacttcatgtgacatttggcaggacaggaatagccactgccccttcagagagggatatgccctgcctcccaggtcaccacagtccccaccgcgtcccctcctacgcctcccctgctttgcttgatcatgttgccagcccatccccctctagtgccctgagcctccacttggtcttaggagtaaatatagccacttatatttactggaacaaatatgctaaactaaatatatccaagtgaactaaatatatccactttacaatgttatgacactcatacacaagctaatccacccaaagccgctctgtcggtgtgctggacgtgtcctgagcacgtagacgtcatgaattccctcccactagctaggagtagtagaataatgctattctacctactacctactactagaagacctcatagcctattcatctggtctctaggtggacagtgctagtgacggggagcccactgcatggcagagcagcttctttccatcttttgttatattcagagtccgggaacaacaacctcctccatcaccttgcctgaaatgccatgcaatttccaccacaacccctctttgacatcttgagcagaggaacgtgtcacgtcctttgggggctctgtgccgagttcctttgtgcttagcagaagctgtgggtctgctacaacccaagatatcatgtgctgatggttcacaggcagctcagtatcaccagccatggggattgcaggagaagttgccgggggcaggagaggacatcacactagatcatactgtgctgctcttcagggcacacaagtcagatctggggtccagtccttgcgtcaccacttttgagctgccttgtgactttgggcaagacactcaacctctctgtttctgcttccttctgtattcagtgaagattgtaagaccctcctgatcaaggggttgtttaaggatctttttcttttcctttgagtccatgagtcttagagccacagcataagaatgaaaagatccatccatgaagaccctggtctcgccatacccctccccatagcctctgtcctgccctgaccccaggcatgggcagaaagctgcttccagacactgggagaaattactccataagtcagccctgccagacccaccagcagtggaccgtcttgcagcctcagaacaggcagggaagttggtcacttgctcccctgataaagggcagcctgtggcgtaggcctccaaagggctgccttgggtggaggagggaagaggccagcagaccaggcaagcaggactatatccccagggacccccatcatggtgttccggtttcccaccctggctcttccccggcatttctctacagctgtcaacacctggggttccaccccagcgctggctggaagggctgggcggggagtgatgccattcttatttgtctgcagtgtaacaggtccctgggagagggaagatgctaacaaaaccttggtcggcatcatctaaaagtgtttagatgatgtgcgggaacagggtgctgcgtggtaaaattgctggctgggtggtcttggccatgtcaatgaacccactgggccttggttcccttttctatacaatggggacgatggtaaaatggttgatgggaggatcgagtgatgcccgccatgtgacggtgctctgccgtgtctcaggttatgaggactatttccgaaggaaagaaagtgacttgcccaaggtcacctggcgagttccaacaagagcagaaccaagacccaagtgtcctgcccacctctcccgctctgagcagagtcactcctctcagaaggtgggcagcgtatgcgcccatcaaggttctgaggcactgcctgtgtcccgcctcctttgggagcccagcattgagttaaacttgtgctcaggaactcctggagtgggaaagtcaaggctagaatctgaggatcacaggccccaggaaagaaggcctcgctggtctctctgatgtgcagctaatgaatatgtattgggcacctgctggggatgtcctgacaaatgaggtagatgtggtcctcacccgcgcagggatgatgggggctgtgcttgtgaaaaggccattgcagtacacacagtctgacaagtgccctggagcagaagtgggtgagatccccaggtccagaggaggggtgtgggacaggcctccgaaggacaggaccttggtgcaaatttctggtagagtggaggagctggtcttacaggagagggggtggtgctggggcagggatgcaaggctccaggtgacctttggcatggctggagggggagtgcagcaggaaatggggggatcagtgggaattggagggagatgagctggggaggtggcaagggcagatggtgccctgggcctttcctgccaaggaatgcagggcttcgctccgatggtagtgggagaagcatgaagtgggacctctaggctggaaggagtggtaagcctggatggatttggggacagctcctactggctgttttgtgaagaaaggaggcagtggtataggagagagggtggtggccagggctggtggggacagagaggtggcacccttggagcatgcattgcatgtagcattgatggttgtggtggtggattgattatggagcatgaaggaaatggagccatcaaggatgaagcccagcctgtgggctggccagccacacgagtgcaggtgctgcttgctgagagagacggggacccaggagcagacactgcaggtagagggacttggaaggctggttctgggcacgcaaggtatgaggtgcctgaaaaccaccagaggtgatactaaggcagttagatgtatagcaaaggcatcggaactcgagagagaagtggctgggggccatcagcacccaggtggagggtcacctggggaaggtgtgtggtgagaagagtgcaggtcggaggctggcaggggccatgtcggcatgggaaagggtgggcaaaaaaggagcttgcaaaggagacacaagcaggagggaatgaggtgcctccagaaggccagcaagagggcggacaggatgaggcaaatggactttcaatggagcaagctgtgaccttggcaagaacagttggtcatcagagctgggctgcagcggctcaaaagcatagagtggggaggaggtgtggacagccctctccagatccgggctgtgcaggaaagagggacagcagagctggcccgggatttgggcccagggaggcttggggctggttgatttgtgatgggaagagagctgggcttgtgtctgtggtggtggaaggggctaggagagggaggcaatgacactgctgggaagctgtgggagaggacagtgggtggggtgggctctggcaccgcaggaggagctggacccagagcccggcaggtctacctcaggcttggggaggtccacagtgatagacagctgccataggcctgtccctggctggaccctctgggaacctcaaacctggacaagcctcggtcctggccttcaacgagcagaggagccacaggttccaggtcgttgaaccaggactgccctctttcaagtcctgggtcctcagcagccgtcttcctcaagctctctgggatgtccagccatgggcccctcctcctctaaaccctctcctcttggctaagccacagttctctcccagtttcctgcttctctgacctttctctttttgagggcagggtttggggtgccatttgttctgcccacccttgaatttgggtgccacccaggtctctgccgtcggcactaccctcttctgtcttgtggggtcatcctcctcccaaatctacatatccccttctcagtcccactgatttctgacacaaggacgtttcttcatgtcttcctcatgggcatctcatactcaatgcttaaagactagagtcctccatcacttccccccaagctcgggggtggtgccactagagccaagttgaaacttctggatcttggtttctccttcgttctgacccctgccccatccaaatggccactgaggcctgtggagcctatgcccagaaggcatctcaaatcgctgttctagaacatgagcctgggcctggattcattctctcctcctccaggccattcccatggccagggaatatcctctcttagagactttatatttctctttaaggcttttatcaatcccaaacttagcatggtgttcaaggccaatggtgatccagcctgcctttcctccagcctcatctcctctctgcaaccaaatactccaggctctcaacactctgccgttgctccggggggtgcctacccaagtcctcccttctctcctgtcctccatctcttctgtcctcccttctctcctgtgctccatctctcctgtcctctatctcccctgtcctcccttctctcctgtcctccatctcccctgtcctccatctctcctgttctcccttctctcctgtcctctatctctccggtcctccatctctcctgtcctcccttcgctcctgtcctcccttctctcctgtcctccatctctcctgtcctccctttgctcctgtcctcccttctctcccatcctccatctctcctgtcctcccttcgctcctgtcctcccttctctcccattctccatctctcctgtcctccatctctcctgtcatccctggcctcacccaacccaggctcctccctcgtgttccccagcaggctacactccctccctgatgtgacaaggtgctgcacgtggttgtgtacaccccgccccaagtcaaggcaccaaccttgaaggctcagagtcctctctctccctccccttcctatctctctctctccatttggaaagaccatgtaccatttaagcttgatgtggaggaggaaatgaaggggtcggagagcagctggggcagatggaccctggcacctgcttctaggttggctggcacacaggcccagtagacgtcagagtggctgtgggcctgtgtggggatcagcagggtgaaggctaggctgaaggacaccattaggctgaaggacaccattgcaggtggtggcgggaggggagcaagtgccatggacccgacaagcaaggccaggtgaaggctagtgtccaggaggttgcggggcttccagtgcaaaggggagaccaagctgtcctcactctgtcttcttctagctgggaaagggggccccatctcagccatcttccctggccaccaggtcccaggggcatggagggacatgggaattaagatccaggtgtgagcaactggttttggtcttggagatctgctacgtgagggtgagccgctgtcacatcgaggcagatgcctcgtgcttggccacagagtgcccttcctaagagaaccgagtcatttctgcgtaccgccgccacggccttcagttcgtcctctcggacgcaaggtggcgcgtgtcctggatcccgtggaaaggtgacccccactggggacacggccaaaactggctggtcagggcagccatggtggagaaggggcagttttagactccttggcggcatcagttggccaaatctgaggtgacaaaaaaacagggtccacctgtactggtggacagcagtccatgtgtgaggtgagggtgagtgtgccaggagagtgtatgagcgtgagtgtggtctgagtgtgcaagtgagtctaagtgtgtggtgtgtgtgcatgggtgtgagcgtgtgtgactgtgagcgtgttagggtggggggtgcatgtccgtgtggtgggggggtgttggtgtgtgggtttgattgtgggagtatgcatcagtgggagtgtgaggatgtaagtgtgactgtgggggtgactgtgaatgtgggggtgtgtggggtgtgtgattgtggggttatgtgtgtgtatgagtgtgtggggatgtggaagtgagtctgggggtgtgtgtggatggttgtgagggtggcgtgtgtatgtgtaaatatggggtatatgagtattcaagtggagatgcaagtgtggttgtgggagtgtgtaggggcgtgagtgtggggtgtgtgagggtgtggggggtgtggggtgagtgatgtgagtgtatgtatgtgtatgaaggtggggacgtatgtgtgagggtggggtgtggggggaggagagtcgggtgtgtgagggtaggggtgtcagcataagtgtgaggatggggtgtggagtatgtgagtatggggtgtgagtttggggggagtgtgagggtgtggggtgtgagcatgtgtgagggtgtgtgtgagggtgtggggtatgagcatgtgtgtggagggtgagcatgtgagggtgagcgtgtgagtgtgggggtgtcagcatgtgtgaatgtgagggtgtggggaggtgtgagcatgtgtgatggtgagggtgtgtcagtggggggtgtgagcatgtgtgagtgtgaaggtaagtgtgagtgggggtgtgagcatgtgtgagggtgagggtgtgagtatgggtgtaagcatgtgagtgtgagggtggggtgtgagcatgtgtgagggtgagggtgtgtgtgagggtgagttgtgtgagggcgtgtgggggtgtgagcatgtgtgagggtgtggggtgaggatgtgtgtgagtgtgagggtgagggtgnnnnnnnnnnnnnnnnnnnnnnnnnnnnnnnnnnnnnnnnnnnnnnnnnnnnnnnnnnnnnnntgtgagtgtgagggtgagggtgggggtgtgagcatgtgtgagggagagtgtgaggtcagtggtgtgagtgtgagggcagggtatgtgaagtgtgaaggtgagtgtgagggtgggggtgtggaatgtgagcatgaaggtgagtgtgagggcgggggtgtgcgaaggtgtgagggcggggtgtggagtgaaggtgtgagggtggaagtgtggagtgtgtgaaggtgagtgtaagggcaggggtgtgtgaaagtgtgaaggcaaggtgtggagtgtgaaggtgagtgtgagggtgggggtgtggagtgtgtgaaggtgagtgtgaggatggagtatgtgagggtgtgtgaggatgagtgtgagggtgggctgtgagtctgagggtgaacgtgagggcaggggtgtgagtgtgaaggtgaggatgggggtgtgcagtgtgtgaaggtgagtgtgagggtggggtgtgagtgtgagggtgtgtgagggtggggtgtgtgagggtggggtgtgtgagggtggggtgtgtgagggtggggtgtgagtcagggtgaatgtgagggcaggggtgtgagtgtgaaggtgagtgagggtgggggtgtggagtgtgtgaaggtgagggtggggtgtgtgtgagggtgggatgtgagtctgagggtgtgagggcaagggtgtgtgaaggtgagggtgggcgtgtggactgtgtgaaggtgagtgtaagggcggggtgtggagtgtgagggcgagtgtgagtgtgggggtgtggagtgtgaaggtgagtgtgagggtgagtgtgggggtgtatgtgagggtgtgtgagggtggaggggtgtgagggtgagtgtgtgagggtgtgagggtggagtgtgaaggtgtgagggcaggggtgtgtgaaggtgagggtggggatgtggagtgtgagggcaagtgtgagtgtaggggtgtggagtatgaaggtgagggtaagggtgtgagggtggggtgtgagtgtgaaggtgtgagggcaagggtatgagtgtgaaggtaagtgaggatgggggtgtggagtgtgaatgtgaaggtgagtgtgagggcggggtgtggagtgtgagtgcgggagtgtggagtgtgaaggtgaatgcaagggtgtggggtgcatgtgtgagggtgaccatgtgagggcaggggtgtgtgtgtgagggtgagcatgagggtggggtgtgagtgtgaatgtgtgacgacaggggtgtgagggtgagggtggggaagtggattgtgaatgtgaaggtgagtgggagggtagggtgtagagtgtgagaacgagtgtgagtgcaggagtgtggagtgtgaaggtgaatgcgagggtgtagggtgcatgtgtgagggtgagcatgtgagggtgggggtgtgtgagggtgagcatgagggtgggatgtgtgaatgtgtgagaacaggggtgtgtgagggtggggatgtggagtgcgagtgtgagggtggggagtagagtgtgcgaatgagtgtgagtgcttgagtgtggagtgtgaaagagtgtgagggtgtgggggtgtatacgtgagggtgagcatgtgagggcgggggtgtgtgagtgtgtgtgagggtggtgtgtgagtatgaaggtgagtgtgaggacaggggtgtgagggtgagggtggggtgtggagtgtgagtgaaggtgagtgtgagggcagggtgtggagtgtgagtgcgagtgtgagtgcaggggtgtggagtgtgaaggtgagtgtgaaggtgggatgtgtgtgtgagtgcaggggtgtgaagtgtgagggtgtgagggtgtatgtgagggtgtgtgagggtgagcatgtgagggtgtgtgtgtgtgaggtgagtgtgtgagggtgagtgtgtgagggtgagcatgtgtgggagtgggagtgaaggtgagtgggtgtgtgggtgtgtgagagcatgagcatgtgagggtgtgtgagggtgtgtgtgaggaagagggtgtgtgagggtgagtgtgggtgtgtgggtgtgtgtgaggatgagcatgtgagggtgtgtgtgaggaagagggtgtgtgagggtggggggtgagtgtgggggtgtaagcgagtgtgagtgcaggggtgtggagtgtgaaggtgagtgtgaggatgagtggggtgtgagcatgtgtgagggtgagcatgtgagggtgtgtgtggagatatgagcatgttttagtgtgagagtgagcttgtgaggctgtgtgtgagcgtgttagggtgagtgtgtgaacgggtgtgagggagtgtgggggggtgtatgtgtgagggtgagcgtgtgagggtgtgtgttagggtgagtgtgagggtgagtgtggggatgtgagcacgttttagggtgagtgtgtgagggtgtgtgtgagggtgagtgtgcgtgagggtgagtgtgggggtgcgagcaggtatgagggggagtgtgagtgtgggggtgtgagggtgtgtgtgagggtgaaggtgggggtgggagcaggtgtaagggtgtgagtgtgggggtgtatgtgtgagggtgtgtgagggtgagggtgagtgtgggggtgtaagcatgtgtgagggcaagtgtgacggcaggggtgtggagtgtgaaggtgagtgtgaaggtgagtgtgggggtgtgagcatgtgtgtgagggtgagcgtatgagggtgagtgtgagggtgagtgtgggggtgtgggcatgtgtgagtgtgagggcgagcgtgtgagggtgagtgtgagggtgagtgtggggtgtgagcatgttttagtatgagggtgagcgtgtgagggtgagtgtgtgtgagggtgagcgtgtgagggtgagtgtgtgggtgtgagcatgtgtgagggcgagtgtgagggtgggggtgtggtggtggtggttctgttgctgccagcgggctctctccctcaagtcccctcttccaagcccttccttcccaagtcctttcagctgtaagctgatggccccattggagcagggtggagcccccccgccccgacacgctgtcccttgctcacctcctcccagccacctcctgcccctctgtgctggaaccaggcaggggcaggtggtgcggcgtgagtatgtgagggcaactcgctggcgttggaaggtgcgccccacaggttgagaagccacgcctcctccacgtgccgtgccagtggcctctcaggcttcaggagtcagaaggctcttctcctggaattatgccagggtcccctctcctggcgcgccccctgccaccctccccaccgcatctgagacttgcacatgtatagcattagaccaacaagacagcttcatcgtgatcctgttgcgcatgtgggactcgtgagtttccttctaagtggaaataagagcattctgattcgtgcttcaggcgcagcttctgaaagctggtggcacttccagatagaaccccaagcgatgtggcaggtggctgggaccctgcatcctgcagagcttgcaggctgacgtgcaggtgagggggagagctcaggactcctcattccaaactctgaagccagggaagcaatggtggtccctgttccttctcctcccatgaatatcaaggcggcttcctggcagactggacaggctttggggcaggcaggttcaaagcctgattctggccccttctggctatgggatcttggacaagtctctcactgtctctaaatctcggggtctcacaggctctccatggtgaggtggttgtgctttgatttgggtaaagtgcctggcagagtgagcacttggtgaatggcggctgcccgagctgctgctgctgttttattatcatcattccctctctgggactctggtggcctgcggtggctgttctttgtgggcgaagctgtagctgggctggctgtgccaaggaggctgtctggcaccctgcagctccacatcccctcagtgggaagcgccagtgtctgctgctctggaggaggaagaatagtgcagccccccgtctgagggggaggggcgcaggggtccgcagtggatcaccagggtgactcagttcctcccactctcgtggtcctctctggttccgtggcctccattccttgcgtctgtaacgggctggatgaatctaggaagcgcgtgcgtcttctgaggtgggaacctgcctcttctccttttttttccctttactatgacgcctgttgctcataggtacaaatcaaacgaagagtatgtatatgtgcgaggccgcggccgagggaaatatgtttgtgaggagtgtggaattcgctgcaagaagcccagcatgctgaagaaacacatccgcacccacactgacgtccggccctatgtgtgcaagcactgtcactttgcttttaaaaccaaaggtaagagagagtcagctggggcactgcccctgcccgctgcagggagctcccctctgggagtcccagcacagagttcaggtgcccagacctctttgcagggggcctggagcagccccatttcctgggttcccacccagcttggtgcccagtggcagagcagctggctccagactggcctgtggctccccatggctgcccccagccatcctcctggaacacacacacagcccctgcacctgtggccacccggccctggcctgcccagcctggtgcggcactcttgctcaccgttcatggttttgcatcttctctcatctcccctcccttctgcatgtctcctgagccgtttatccactgatctgagacactccagcatccatgctcgtcactgccactcttgcatttggaaatccattccactcccagctgcttaacacactcgcatgctctcttctcctgccagagcgcgccgacctccacccacctctccactcccaccatgcccctgctccacccagcttctctgcacctctcagcacagggccagccccccactcccagactgacagccctgtcacccctgccccagccacaccccacatcagggtcaggataggctctggcagtcactggtgaaaggaggggcctgctgtgaaaggcatgcatcccagagagctgtgatgggtgatgggcatggcctggcctgccacagccacccaggccaggcccctggtgtggacaaaggagctgagtccatgagattcttggattgcactctcctactgcaggataggcagggaaggtcctggcagcttgctcactgcagactgaagcgccttggagggagacccagggctctcggcaccccagtgtcttcagcctctggagcttgatagattcctgggtcagggtttggacatcagggtcctgtcttctcctttgagcaagttgggggcttctgggagccccacggtttctcagggggtgaaactcaagggcatccttcagctgtgccacctgttgacctttcttctgttggcaaagttgctcccagcaagcgaggctgggcagctgctctggagggggcccagcagggtccctacccttcttcacttcctccgtgctcttgctgcttggccccttccgttctctctataccaggtcaggggccagtttatcacatcccctgggagagtggcctcttctctgactgtgttcccatttctggtctcctcaccccattaactgaacccctgccctcctctgtcccctcgccatcatctgcaagttgagctcaaattttcctgtcaaggttttggtttaaacagaggtgcctgccctcccactgcctttcccccatcctcttctctcttggtgtctcataaacaatgtcccaaaggttgcccagagagggcacattggcccaggactccccacccaccccatgggtgcttcgaaggtgtcttccatccctgcagccctgcccagcatgcgtcgccctggacatgggctgtccctgacacgccctccaaccgcacttcctctggccttctgcagccagtcgagattttatggaagagcaagacggggataactgactgacaattcaatggacggtcttcaactctaaaagcggaaaacttatcacccaagtccccttgaaggtgaagaaagtgatcccagaaaacagaataactgttaatgctggagctgtaactagaacacgggccccgagctccagggcatcaccccatcatcttcctttctgtgagcagttagttccctcccttccctggagtgggtggcaaaaagctgcacttggagtggcctgtgtccaggggaccacactgccagcccagggccaagcagagcacacctgtgccccacacgcagcctgggctgcccatcgcctcaggaaaccatcactctgccgcgtgagactggaagtttccagcccaagcagtttcccacagggggcccactcaattccctttgccttgggtccctagcaggagcccgtactttctaggagatgccttcattggaagccacactgagcctgtctgcagtcccttcctgggtctctctgagccagcacagagccagggccctggagggctttggagggtccagagggcgtaatctgaacagaggggctgtaggccctccccatttccaggggtgtagagcatcccccgaggtaaggctgcccctgctgtcctgaaggccagggctgtgaggccgtgctctcaaccagtgatcaagcagtgccctgagctcttcctcaactgttcacaggggcttctagaagactagaaccttccagaaccaacgaagggagcagatgggaaatggtggaatctgaaactgtttgactaatagagggaaggccaggttgggatggtggcaatggaagcagggaagtctccctgttaactctctctgcagtatgggggtgaagggagagcagggcgctggagctcctgtctgtttctggggccaggtgtctttgtggagtgctgggccccgtcagccatcagctcagacaacacaggccccttgtctccggggctgtgtgcctccccattgggccacctccaggcctgccccaggcagccctcccgaccctaccacccggctacaccagggcctggggagcccctcctgccttcctgtctgtctctgtctgccgtgtgtgtctcgtctcttgtgtcagacgtcgtggcagcagctcaggcctctggaaactggctaaggaatgcgtcagtaggtggggctggggaggcctgtgggtggccctgtggtggctgggggtcccatttcctcttctcagatggttcccagaggccagcggatggctgtgccatgtccaggcccttgcaccgatcgcctcaggggacagagatggcctcaggtctgccagcggcaggggcagggacagagcggttgatcaaagccaaatgaggcaggcagggttgttggtggatgcccttttatcggaggttccgcctcttcccgacacccatcactttacctctcacttgcctttcctcttcattccaggcctgtcaggctttggtggggtctgggatgactgtgagaagctgtggctctgcctgacaagctgaggccctggccctcaacagggaagtggtgttcaggctgtgcctgcagccgtgtgccccaccttcccctttcacagaggaggagacaggcctggagaggggaagtcacagagggacccggacagcactcagggctgcccatccagtgtccactcctggacccgcaaagtcacctccgatcctgactcctccctgcacccccgtggcgggggcagaggagaggcaggcctatggggggctccctggtgccttctcctgagaaaggtaaaaccatttcaccaaaagcatcatcttagcatctcttcctccacacccagcatggtgcgtggcagagcccctgggctgctcaatagagtgactcacatggggacaggggtctgttctctgccaggcacactctgctgccactctacttgtgtcacctcatcaagtcctcccgcatccccacgaggtaggtattacttcacggttgcagaaaccagggctcagaaggttgaggaacttgcccaagagcccacagctggcaagtggcagagcccacagtcaaacccaaggctgccaggttccatctaggttccattctgcctccacatggagtgggaaaggcccccagagtcttgagacctgggtctagatggaactcggcaccaaccagcactgtgactgtggaccacttgattcactgtgttggttcaagcagccctgccagcatccaagacagccagtgatcttgtctaatggtgccatcagcacctgggcccagagtcagatcagaagcagggagaacctcagcctggcgggggttgaattacatggactttgaagctccttccaacattttcctcctgcgatgacaagggcatttcccatacatggctattgtacacccattgtgtgcccagcgtctagcttggttcattagagacctaaaccttccaggcagaacaggtgcaacaagtgaggtaatagccagaatgagcagtgtccacagtgctctgtggcctggggtagtcagggtagggtgggcctggctccacgaccttaggacagtgggtatctctgatccgcggaagaccccagctgccttttcccacctcttgactgtcctactctggctttgccttctcatgacaatgagggccgaagtccacaaggttggatagggacctctgaggaccctctggctacaagatgactctgaaatttatggctttgctcccactatggccaggagtaggacatccagatttatttccggttgtaggaggaaaacccaaattgggaaggatagagtcatgaactaggaccaaggtgaagaaagaggaaaggaaacagctcccctcccatccctgctgcccttgacttggacacctcagggaatcccagcttaagggtcccccattaacctcttagcaaaaccctaaatatttcttctaattctaggaatgattaagaagcacccttcagttcatccatgggccctctccctggtcacctatccatccatctcatctaattgttttcctgttcatttatctgctcatcctatctgttcctaccattctcccatttgtcctcccacccatccaacttcccattctttcatccttctgtctgtactctcatgcatgtaatagtgcatgtatccattcatccatccaaccagccattcttccattcttccattcatccacgtctctgtcctcccatccagctctccatcatctcatctgtttattgacccattctccatctatccttccatttgttttcatctactcacctatcctccgtctgcctattcatctccttatctgctcatctagcgttccatccttctgtctatcctcttcctgttcttcattctctttatatttcctttatccactttatctatccacgcaccaatcgctctattcatccactccaggaggcttagctctttccattcttctctcctccatccatccattcaaacttaccaattcattagactaatgggacagagcacctgactcagggaacttatgacttatgatgttaatgaccatatggaaatatagccatccccagggcaacagtgagcacatcacggtttgggagtagctgctgggcccaaaggaatatcctgaggcatctggcctgtgttcttctggggcaggctgggatgctctgcctgtccttcctagaacgctcctgtccacagagctgtgtggcctgtgaaatgttgtgcacctgttggggaactgaagctgttgctactgttccctgattccacagagctgctgcctccactcttcagcttgtgggctggacctacaacttggggcaaagtcagcctcccctctgagggctttgtaggcatggagcaggacagaggccttgcccaggccttccctgaaccaccctggtcctgtgtctgcactgtagattggcctggggaaactgaaggcccagaaatgggacttctctatggaaaccaagcttgggcccccagccttgtggctcctgagtccctggctagtagacttccctactctcaccttctgccctctcgccatgcctaatattaaatttgccctggtttctctacctacactttagaattctgccctgtgagctgccctagaggtgtcctcagccagaagggcatgctcagtcctcacccgtcatgccggtcaatgggagcctcccacgtcatcccacacttgagatggccaatagtcctgcctgatgagtgtcaccagctactagggccagacttaaatcagaagcaaaaaaaaaaaaaaaaacctattgcacttgagttgtcttttaatttcttttttgtttgttttttaaccagcatctcacttcctcattatactgtctgtcccctcacagccctcgcccaccccacctagctgctgtgcactgccctgaacagcagctgtggctacacttctgggcctgagcaccggggcagagggataccccagctcctgcccagccctgcagctggcagggccttgactggcctgagaaaccatggcctgccggccaggtgctacctccatgagccctgggtccgccctggcctcctgccccatagcagagcctaagtattctcgtttctttctagggaatctgactaagcacatgaagtcgaaggcccacagcaaaaagtgccaagagacaggggtgctggaggagctggaagccgaagaaggtaacaattgccaaccttctccgtcccctttccccttgtccgctttccctatcctcctccacctttcctgcttgccttccctgcttcctttctgtctgctttgccccattccccctcctcccctctctccctccaatagcttcaccttcagttctcccaattatcagacaaaggttaaattccctgaatgatcgagccacctccccacatgctgataggatatgctctgcagccctagctatcatgcattaccatctgccatgcaggtggagcgcctggcacccatgggtgctcagtgaatgtttactgaataaatgcacacaagagaacttacagccaacgttgattgagtgcccactatgtgtcaggcgggttctaaatgcatgccctgaattatcccagccaacccctcatagtgacactgtgggacacatactctccgaagctccacacccacactcctgcctacacactctggcatgggcctgacacatgggccttttggagctaggagagtttcaaaaaagcccaaaccagacctgacagccgcttgtcacctcccagccccatccccgtacacaccccggccatggtggtcaatccccaggaggcatcttagagtcagtctctgagaagacagggcagaggagtcgaagccagtgggtctggctgagcactgcccagcctcagcagtcaggcaggtggccagaggggctttggtggtggacggcagtccctccaacagaaggaggctggagccatctcgccagcaccaagcaaagcaggaagcatactgattccctgaaatcagccccaggacttagagtgtgacagagaggagtgtgtatgcacgcactgtgtgtcttgttctgtttttgtttttccaatttggggatgtatttgtggtcttacaaaaaagagttaagtcatatttccttttaggtggaataagtcatttttatagaggagaacacagtgaacttggggctgttcccccccaaagctagaatggggttcactatgcttgtcaaggatacactgggccatatgcacatgttgtctcattgagtcctcaaaacaggtggcagaaacttgtgtcactcatgttaagtcagggaagtcaaagctcagacaggtaaaaatagcccaaggtcacacaaaaaccctggctgcatgccagtccactgcctggtgggctggaccaggggagcctgaacctaagccagagccctcccctgaggtccctgccctgccccagcctcattttcccagtggagcaaacgaggatgctcagagccacttttcggaggacgaaatccatgcattcattccagaagtaattactgggcacagtctctgtgcctggctctgttctgggtgctgggggttccgcaataaataaaacagctcctgccctcaggcagtcggcatggcaggggagctgggcaaggaacgatggtggagtagagcaggggccctgcctgtgaagccaaagagaaagcagaagagccaagtgagggctggggcccgtggggagggccgctgtgctagacagggcggtgtgagcagagaacccacccggaggaaccggggtcaggagccacgtggggtcagggaggagctctcctgcagagggagcagcaggtgtggggtccccgggggccacggcgcttggcccgcgtgctggagcccgctggacgcgggggcagccggttcagagagagctagagcctgagggctgaagggcatgggggggtgccctggagcggaggagagaggcagggcgtcctctggcctgtgccgtgggcgcggggagcacgggtgtgctcaggaggtggaaaagcggcgggattctggggaggttccggagggagagcccacaggctcagatgaccccatatggggcagaagagagggggaagaacgaaaaggagccatggaggactccaaggattacggcccaagagactgaaggatggagtttccacttcccgcgacgagacagatgccggggggagcggcaggagttcgtgtctgtgggacgcgaggtggcgcgtgggagaactgcctggaaggagccaggcgccccggccctgcccatggtgctggccaggctgggcgctagcgccaccgtgtggcctctcccagcggcgcccgccgcgcgctcaagctctctcatttgtggagcgttggcctggatcccagcaggggcggggccgctcctgcaagggccctgggaaggggccgcccagccagaggcattccctcagcgccctgcaggaacgcagatgtggaggccccggccagccccgagctgggcaggggactcttggcttccagcattcatgcactgagtgcccaggacgggccattacccccactgggtctcaacttccacattagtaaagaggatctttaggagccctccctgctggacatcaggagacgctggtcctgactctccttcactcctaacactacccctgtgaccttcatctgcaaaatgctgacaatcccaccccagctacctgcctgctgagactggggggacagggtatcatgggatgacaggagctgaagtttattgggtacttactgtgtgccagaccctcacagtcctctgaacagcttcctagagtgcttttattgctacccagtttacagatgaggaaaccagacacacagaaagtaaagtatccaacgtcacacagcaaggaagtggtagtgctgagattcaaacccgaccattccctgcttcttagtgcagcacatcatttttaaactgtcagcgtaataatgcaagggctgtaaaccttagttctgactcagccaccagctctcactgggtcatctgtgcctggattttgctgtatgtaaatgaggggcagggccaggtgaacaggtgttgaattaggcccctcccaaagtcctaggcaagggaggtaaatgcctggggcataactacaaagttcacccccatccccagccctgctctcatcctaatccttcattcctcctctggtctcatcaccctgcctctagcctcaggggcctccttttgcctgccagccccagctccaccccatagcttttgacctacatccggctgaatgcccacttttgtccactttggacatctgactgctgcatattgagtgacttggaagtgctagttccgggctttctggccccggggcagctgggcatggttgagagccaaagcctagctgccccagcggcctgagtcagtttctgtgccagccctcctggtcaggtgggtgcagtactgatatgtgtgagcgatggggctggctggccagctcaacccacctgtcagcaacctcactctgcagaccagaaacaggttccaatggtctagtgatgggccagcgaacaggccagatgttagcggagctctccccagcgtccggattgctgtccatttcagagatgcccaaactagactcctgacatgttagaggtgacccgactggttggggtcatcccagaggaatcagaccaggaggctagtattccagagccctaacccccacttttagactctattcaataactctgtcattattcttatagtctgtttaaggagtgcaagtgacctaaatgtccaacaatatctgaaacaagtatcacaattttgttttttgtttactcttgtgaacaattgcttccaagtcactcaacatgcagcagtcagatgtccaaagtggacaaaagtgggcattcagccacatgtaggtcgaaaactatggggtggagctggggctggcaggcaatgggagggccccgaggctagaggcagcctggacttcaaaagggcagtggctcctcagataagagcgtggctgggatggggacctgctctgcagcctgaggccagcttagtcaagccgcccacagaggccagagtccgccacctgccagatgccattgtgccagccaccgggagcctggtcaccgtggcagatgtgtgtgtacactgaccacggatggctctgtgctgctggaccagccagtgtgactgccctgtcctggaataacagatttcatcattaatgtattaatatggtagctataattatttttaagccctcaatatgtgccaggccttcattttagtcctcctagaaaacctggtgaggtgagaccatcacattcattcgacaaagggggagaccaagcagagcaaggtggtaagttgcccatggtgaagccagcactgagatgctagtgaaacaaacaaacaaacaaacaaacaaacaaagactgtcttctttgctatggctcaatcccagccctactgctgtcttccatgggcaagttacttactttctcttacctcagtttcctcatctgtaacatgaggatgagaacagtaccagcttcacaggattctctgaggtctaaatgaataaatatacctaaagctctcagaactgaacattgcacattctaggcataagggaattattgttcattattatttacaaagcgctcccatatctgttacgtttcttggttgtcccaacaatcttgtgcccttgcgatggctattttgcccagtcagcaggcaaggaaactggggctcagagaggagcagccgtgtgggcagtggggccaaggcccaactgtgaccttgggtcttctgtgtttgccctcaggaaccagtgacgacctgttccaggactcggaaggacgagagggttcagaggctgtggaggagcaccagttttcggacctggaggactcggactcagactcagacctggacgaagacgaggatgaggatgaggaggagagccaggatgagctgtccagaccatcctcagaggcgcccccgcctggcccaccacatgcactgcgggcagactcctcacccatcctgggccctcagcccccagatgcccccgcctctggcacggaggctacacgaggcagctcggtctcggaagctgagcgcctgacagccagcagctgctccatgtccagccagagcatgccgggcctcccctggctgggaccggcccctctgggctctgtggagaaagacacaggctcagccttgagctacaagcctgtgtccccaagaagaccgtggtccccaagcaaagaagcaggcagccgtccaccactagcccgcaaacactcgctaaccaaaaacgactcatctccccagcgatgctccccggcccgagaaccacaggcctcagccccaagcccacctggcctgcacgtggacccaggaaggggcatgggccctctcccttgtgggtctccaagacttcagctgtctcctctcaccctctgccccctgggaagagaactggcccctcgagcacatgtgctctccaaactcgagggtaccaccgacccaggcctccccagatactcgcccaccaggagatggtctccaggtcaggccgagtcaccaccacggtcagcgccgccagggaagtgggccttggctgggccgggcagcccctcagcgggggagcatggcccaggcttggggctggccccacgggttctcttcccgcccgcgcctctacctcacaagctcctcagcagaagcccagagacctgcgcctccccgtgggtgagttcctgcccctggtggctgggccgcttctcccctgtgggtgcaggggttgcaagttcacaccctcctgggtatcacacctggaactaaacagctctgccagctcagtagttattaataatttagcaaacatttattaggcacctactgtgccatgcaccatgctggctgccctaaatcagctggcttattaaactttattttagcctcagaagcacagagcatggactctggagttcatgggaaatgggttctaccacgtattagtccgttcttgtattgctataaacaaattcctgagactgggtaatttataatgaaaagaggttgaataggctcacagttcttcaggctgtacaggaagcgtggtgccagcatctgctcggcttctggggaggcctcaagcagcttttactcatggcagaaggcaaagcgggaacaggcatctcacatggcagagtggaagcaagagagagagttgggggaaaggtgccacacgctcaaaatgccagatctcatgagaaatcactatctggaggacagtatcaggccctgagggatccgtccccatgacccaaacacctcccaccaggcccacctctaacactggggtttacaattcaacacgagatttgggcggggacaaatatccaaacgatatcatatcacttgcaaggggtgtggccttggatgaggttgtaaatactcgtgcaattccccatcccccaccccatccccatctgcctgtgttctttgagcagatggcacaacttaaccaaaaccatcaccatctccaatatcactgtcaccagtgctctcagagacaccacaaccaatatcatccttgtcaaccatcagcactatccccatggccagcaccaccactgtcaccattgcaccaacacaccactgctgccaccccatgagcacagtcaccatccctgtcccctcagctgccatgacccctccactgatagcaccatcattgtcagctgacccccttccgacaccttctctgtccccgtgttgccatgacccagccctgtcactcctggaggaacactgatctaggaatctttccttgatttttaattttgggttcacattcaaattcctggaggtagcagaagggcaaagagcctcaggtgggaactcatgtccaagagtgaagctgggtgaagaccattttaggaacaggacaggcagcagacccacatagaggccaggctcatgggtgacaacagggccccacgtcgctcaagtatcccctcctttgaagacagatatgctggctagaggcatggagaccatggggcctgagcatactcatggtcactgtcgagctggagatggcccattccagagatggcagctggctcagcatctgtgggcagggagtcaggaacttggttctgggctcagctcagccgggaccctggactcgctctgtgatcttgggcgagtccccctcccacttccaggcctcggctccccatgtgcccagcatgtaaccttcaccttaccttgtcttgttttctgaccccagcagaaggccgagtcccgaagtccctcctgctcacccggccctgctcatcctctctcctcccgacccttctccgccctccatgacttccacggccacatcctggcccggacagaggagaacatcttcagccacctgcctctgcactcccagcacttgacccgtgccccatgtcccttgattcccatcggtgggatccagatggtgcaggcccggccaggagcccaccccaccctgctgccagggcccaccgcagcctgggtcagtggcttctccgggggtggcagcgacctgacaggggcccgggaggcccaggagcgaggccgctggagtcccactgagagctcgtcagcctccgtgtcgcctgtggctaaggtctccaaattcacactctcctcagagctggagggcggggactaccccaaggagagggagaggaccggcggaggcccgggcaggcctcctgactggacaccccatgggaccggggcacctgcagagcccacacccacgcacagcccctgcaccccacccgacaccttgccccggccgccccagggacgccgggcagcgcagtcctggagcccccgcttggagtccccgcgtgcaccggccaaccccgagccttctgccaccccgccgctggaccgcagcagctctgtgggctgcctggcagaggcctctgcccgcttcccagcccggacgaggaacctctccggggaacccaggaccaggcaggactcccccaagccctcaggaagtggggagcccagggcacatccacatcagcctgaggacagggttccccccaacgcttagcctctctccaactgcttcagcatctggcttccagtgtccagcaacagacgtttccagccactttcctcgaatcatcccacttcctcagccccatctgtccctccgtccaggagctctcacggccccatctgttgtaccttcccatgtatgcagttacctgtgcctttttctacaccttttgttgcttaaaaagaaacaaaacaaatcacatacatacatttaaaaaaaaaacaacaacccacgaggagtctgaggctgtgaatagtttatggttttggggaaaggctgatggtgaagcctcctgaccctccccgctgtggttggcagccacccaccccagaggctggcagagggaaaggggtacactgagggagaaaggaaaaggaaacttcaaacaatatagaattaaatgtaaaaggaagcactcctgtgtacagatgcgatcaaggttcctgtttattgccacttcacccccctgcccagctcgtagccacccctctctgccagcagaaaggccagtgtccccaggcagaggggcacaaacacaggcaggtgacccccacccaggccccagcaggcaggcccagaaaaactaatcttttccttttttttttttttttttttttttgcaagaaaataaaatgatacttttcctaggatttcaacacaaaataataggtgcaggtagaaggaggagggctggctccccaagggctcctggatactctggtagtctgagtcatgggcccatcctggcactccacaggtgggcaggccaccccacccacgcacccccactccagacacctcccttctgcaccccaccctggccccctgggctggggaaggagccctgactgtccgtccctggctcccaagcccctgaccgaggcctcactctcctgttgcctcctctgttctaaaaccaccaaaccacccacaaaggcagaagtggcagggcccgagccctaggggccgttcctgagactgggttttgggttttgtttcatcttggtccctggggtacaagggagcctgttcccctcatggctgggtttttccagttctccacagcagaggtttgcggggaactgtttcaggaccactttgccacaggaccgtttccccccgtccctgcccctgtctccactaccccaaggaaatacccacaactgtggctggtggatacggcctggacctgtttgctgtcttacacctcttttttaaaaagagagaggatggtgtttgatacttcacccagccaccacagattcttttgacctagaggatttttgaattgtcctaactcgttggaattctccaaagcaatcagtgtgagccagtgcctcttccttacccacatctctactttcaagaagctgccctgcatttcctggggcaaaactctactttgtaagaaaaataataggaccagaaatttaaatcccaaattgaactatggaacttgaactctagcgtgttcgccccaactgggagaggtgagctttttcccagtgtttcagaactgattttctttactttctacaagggagggcagcacagggactacggttgaggcccgtgaaggctgggtttgatgccaccctatacagagcagggacctctctggctaatccccagtcctcagccaggctgtgtgaatcaagtgcctgccccagggctcttgagctattgaagctgcttgggtacaggacacagtaggtggggagggttaagacccttctgtgagttccctgtgcggggctgtacttgcctcttccaattcgtggcctttccctgcttggtccctactagacagacaaaccagccacagtccagcctgcagccagaccaccttgttcactcattctcctttgcctcagagctaagacaaaaatgagacagaaggcagggctccctgggagtccactgtgctccagggttctggggaatcagggttagccagcagctcctggctgcttccctcagagactagggctctcatcctccccaagagaagcagcaagcccagcctggaccacactgtccatattgctggacagtggcctgacagaaagtgactcctccaagtcccaggaggccagggcttttctcatccttgcctttcagccctaacccatgggactgcccacggattggagacttcaagggctgaggtctgggagctgcataaagggcattgcttcagcccaggttagaaatctgcctgggcaagctcttcctgccccagacctacaaagcagcagaccgggggctctggtggactagcccctgacattggtggggggccccacaccactccaccccaccctgccttccagctctcctgggcatttttctccctgtactcaaacagcctacccacccaaggtttcctccctgggcagcctagcaatgaacagtgcagccggcagggcagaggcccggcagtcaccgggcccgtcaggctcaggcagagaagccacaggggccaggagtcactggagactatttctaaatgatgggggtaaatgcacaaatagaatctcaccaaagggctgcctccacattgatgccgtgcccagagggacagaaccaatgccaccagcctgggtatatgtcactgggcacagctctaaccccctcctccggactctagtcccgctcctctgcgcacagagcccccagcccacaggtacaccttcatgatttggagaaagacgctcgccccatgcacgccctcctctgggccttctgccctgctcccagtcacttccaagcttcctgtttgcctgtgatgttattgtgcctgttgagggaagcagcagaggaggcagtggctgacttggcacagatgcctgctacgtgctctgttgaaatgcgcggggtggccattcctcggtacagactagtcctggtccttgggtgtgggcagtgggggaggaaccaactggtcgaggtttcagagccaaaccttgcctttggttggtgagtccttgccccccaggcctgcgctccacgatgcccttcacccttggcaatctcagggccatcctgggtagtaaccccactcctctctgctcccgcccgcacctgtggctctcactctgggctcaacccctgcaaccctccaggagcccgacagcagccagctgcctgcactgtcgcctccgtaagctccaacttccagacccagaagtccctctgcttccctctgttggaaaaagcctaaaagaattagcttccagattcctctagcccctgctccattcccacccagtccttctgaagaggaatgagcaatacatctgagctggatttctctctagtcctttctccagacaaatccttcttaaagcaaaagtcctggctgagcacctgtccttggggaccgatctgccgtgtgaccaggggaagaaagttcccgaaagcctgttccaccaattctgcttctgtgttgtgaatccagtctgctttccattagaaaaccgcttcggcacttatggtcactttaataaatctagtatgtaaaaaaagaaagaaagaaaagaaacagaaaaaagaaacgtgcaggcaaatgtaaaatacaatgctctctgtaagataaatatttgcctttttttctaaaaggtgtacgtattcctgtatgtgaaattgtctgtagaaagtttctatgttcttaaatggcaatacattccaaaaattgtactgtagatatgtacagcaaccgcactgggatggggtagttttgcctgtaattttatttaaactccagtttccacacttgcatcttgcaatgttggtatggtatatatcagtgcaaaagaaaaaacaaaacaaaaacaaaaaaaaaaacaaaaatccacgcaggtctaaagcacagagtctgacgtacaaaaggaaaaatgctcagtattgatgtgtgtgacctttgttgtaaattacatctgtactgtgaatgagaagtttttacaagtataataattgcctttattacagctctggctgagtgttcagcctgaggatattttttaaaaaaaaaagaattagcatgttggaataaatttgaaaatcccaacatagccctgcttgcctggctcatggtttttctagagggttccacaatgtcagagttggaaggatacttggcatcccaagtgctcattttgcttcagagcagtcaggccaagagagcggaggtgactaggctgcagtcacacagcccaggacactcttgcagaccctggaaaggcctcgcgaggaagcaccagatatagcaccatgtggtttggggcctgtatttgttccctagtctgctgtgacaaatcaccacgaactaggtggctttaaacaacagaaatttattctctcacagttctggaagcctgaactccaaagtcaaggtgttggcaaagttgattcctcccggaggctctgaaggagaatcaattctatgcccctcctagcttctggtggctgcaggcaatgcttggccttccctggtttatacactcatcactccagaccctgcctccacaaggccactttcacagattccaggctttaggacataaacttaactttcggggggacccccattcacctcacttcaagatgagtagtgaattggttcttgagtgttggcagtgggggaggcacagcgcttactgcctgtgagaccttgggcaactcacctaacctctctgtgcctctgtttcctaatctgtaaagtggagggtcatgatccacatctataagggctggcgtggggattaaatgagatggcatatacagggtggctaacacagcctggaacatagtaagccttcaacaatttgtttccgagcaggctttgcacagggttctggggttacacgggcggaaaagatagggagtcctcaccttctgtattcagcaatgatttgccgagtgccaacgagaggcagtcattgatacaacagcgagcaagacagacacagatccaccacgaggagctcacattgtagcaggggaggccatcatcagttactcaatcacagcggccatcactgctgtggtggaagagaatgacagtgctaatccagagtgagtctgcatcacccaggggacttttccttggaaaagtcctaagggtcgggaggacgaagggagccatgagaaggagatattaatggacgatcaagggggattctcagggtaaacgccgtccagaagtttagtgctaagagcctaagagggtctgttcgttcaaagcaatcagaggatgaattgttgccggcttttgggaaagctggactagtacagttcctggcgcacagtgggcccttcatagatgctgctgagtgttgagtgaataaatggtggctgtggatggtggtggttgaggagtgagggcaaggtggggaagtggaggtagcagacacagacaccttctaggggcctaggctagagacaggggagagctggggcagttgttggggggcgcgtggagtgcagggaaaggaagctgagtgtgtgattggctggtgaggagatgagaattcagcctggcttgatgaagagcagatgtagactcctctcccacagtggcctaaaaggaggggagggaggaagtgcagatgaagtcagtgtgtctatttggtgacgggaagttgaggacactcttaagaatggattgtatgtgggaaatagagtgaagtcacctgaggaagctgctgggtgagaagatcaaagacacctgagtaggagtgaatgacctttgaggggagccagaggaagccgccagggaaacagggaaggcacctgcatagcatcacgggccggctgccctctgtctgctcagcggtgtggtttttccagcagtcctcagccgctggctgtaggcatggggaaggtggcccagggttagccaggccatgggacacaaggacaatgagttactggaggtgagtcactggcgagtgaagaggttgaagccaccagccactgagcccacacgctgagaagggaacaaacaggcctggttgataaggagaaaggccagtggtcaagtgaccacttggatgaaaacaggaaaatgttgtgagttgtcttaactcgttggatgaagaccgtgtcagccacaggtgtggctgaggtgcgatggaagagatcaggaagtgagagtccagggtgctgagtgggctgtgcaggtggcagatgaggccatcactgaggattgcagggcttaagtggagatccgggctgtgagccaaggcctaacagtcaggatgggttctgttacgcagcagaaaccagcaacccagacactcagtggctgaatgcaaagggaagtgtatttctttccctcactatatgttcactgtgggtcagcaggggaattatgcttatcctagtcagaaacctaaactgatagaggctccttccctgtgcttccatgaccccaggggctgaggcaaatacagtactcgtggcctcctactggcaagtaaatgcttttacgtggaaactacaactatcccttccatgcatattttgctggctaaagcaagtcacgtggtcatgcctaatgaaggagaatgagaataattggaaacagccgtaatgataatcatacaaggctaggacttctcagaattggaagaggagatgagcagatgtcagcgatgggagggaggagggcctgacagtgttagcctcaaaggtgctggatttttacagtgagtgagtgaaaaaaatacagttcagaagaggccctgggagcaaacgtggcagctggctttagaatcatgggacgaagagccatcgttggagcaggtgcctggggagcacgtccttgggtcatgcggggggcatgtctcagtctaggccagtggggaagtagaccccccgcatcagccccagaaggagaagaagaatagcatagtatgtgctaggcccagtgtccagcattttacaaatttgatttgtagtccctacaacaaccagcaagatgagagttactgtccccatttttagagaggaaaacagaagctccaaagggcccccaggagccgaaggtgcacagctaggtaggggcagtatgaggactagaaaacccttgtgtggctcccatgtagtccttcagggaaactgaggtcctccctcctcctcccatctcacactcgggctccaggggagcccggaatctcagactgtccagctgtgaccactcagggtccagctggggcttctctccagcagcctcctgacttgtcagtatggccatctggtagccattttaggtccctgtgcctgaggccacaggtgcaaggaatgaccagccgacaccagggcctagattccagtaactgagagcgtgaaaagtgcctgtgaattctttcctccactggctgccaacaggcccaaggcccaccaatcattcacacatcgctggccagcaggcctcccaggctgctctctgaggttcatgaagcactttcccatttggagtggactaggacagggcgcacactcccatttgcagatgaaggggagagcccaagatcacaccctggcaagtggcaggaccactcacctgtccccctgaccccagcctcagagggtggtggccactgctggctgctgctgaggccttcaccaagctttgtctgggtccaagtccaagtctgggctggggatgcaggactcggggatcctacactcacccttaggcctgggtcctctctgggctcagaacctggaggccacactctgtcctggagactccggtggggtgtgggccactgtagataggatgggccagcctgagatgggcaggagtgcagagaagaaggaagagctggtggaggacagagagcaggtgaagagggtgcagatggggctgtgcttcttgggattcattatgggcactgctcaggagaccctgggaggagatgccttataacctcattatctattctagagtgggaaggtaggaagtatcagcgtcatttaacacgcaaggaaattgagtcacagtgaagttatttgcccaggttcagggtgccagagtggtgacactgctttcccaaggacatcatggtaagtgtcagggccaggagttgaaaccaggtcccgatatttgggaagtggttagcttcctatggaaagagaatctgggcctctttgctactaagcagccctggaacctgggttggggctgggggaccccaacatgcatattcctcggtcctttccaggcatcacctacttcagggggaccccgctgcctactgcttcccttccagatgagaaaactgacatccagagctgggaagtgcttggcccaaggtcagggctgtgattcccgatccctcaacaaagccacctgcaccaccccacccatccctcctctaccccaggcctgagttcaactgtccgtctctcctgcccagctctgcctttttaggaaaggaaaagaacagccctggggcgggcgggcaggcgggcgggcgggcatgctaatccacctgctcccggcgtctctagttacccgtggtttggggctgggcagccccagctgggagtgccagtccagccaatgggtgctgccggctgagctctccgccagagccataaaaggctttgccacagcccaggcctgagctggcatagggcagccccagcaccagcgcccgccccgcccctgagcctgccagcccggcacgtcctcggactctgcctaatccagcctgggagcagatgggcctgccgtgcacgtgcaccagacccaggccgctccaaggtcagggaggtggcaccaccagggcagaggccagagtcagggcaggggcttagctagccatggtgatcctggcgagggtccagggtgatgacacctaggcctggtccacgctgcatcatctcttgacaatggccacctagcctgcctcctccacctctgaagaggctctcagcaaagttagtatccggcttctgcaacttctggggtcttcccagggatcaagctccaacccacttaatccaccctgggttcaggccgcatgttcctctcaaaagtaggggtatccattagtgtgtgcctgttgtgagagccatgtgtgtatgtcccctgtggcctgcaggtggggacagacagcccctccccagcacagcccatccaatctgtcagcgcataatgcctctaacttaacactcatatgatccctggaaggtaggaagtattggtcccatttaacaagcagggaaatagagtcatgaagaggttattagcttaaggtcagggtgccaggatccagcttcagagcagtctgactctagagcctgtgttctagacctctgggcacgcagaccttctcttggaatttaccatcctggagggaaatgggaccaacatctagagcaacgtgtgaatgcgggaatgaaaggcatgtctgacacatctgagataagaggaccctttgttcctgagtgctgagagtagagggtgcttcccaggcctccaatgcaccgacactgcccaggctatgactgcccatgtctgcagcaacccagactggataatccctggccacctctgacaattagattcttcacagaagccactgggttcaagcacccttttgtgtgtcctacataggccaagctgaactgagggccaagactgcggtgttctccagggccaccctacaggtgaaggaaacgtgctggcatgggggggggggcgttggcgggcctggctggcatcaggctctgtttgctcacccaggaaaggaggagataaatatagacacaggattactcagatacagcctgggaaaaccggctccagagccttgacttcagccctggcccagcctcgccttcactggcctgcccacgcagtgcccgctgccaggcctgccccgcctcctctcaggacttccttcctacctgctctccctgggaactgggcaagcacttgtctcaactcccatagcaagtgaggaacagacaaagtcagcgcttgcttgggcaccgggagtacctttgaaggcccaggcactataccagtacagacacagtttcctcagtttccccgtctgtgaggtaagaggctggtgcacccagccctcaacttccttgggcctgaatgtagagaccacccagcagaaagagggtgaggtcgggttctgtctcacgcacaaggagatgccagtcagagtggcatgtgttgggggctgccctcggaccctggagccaagctgcatgggctggaatcccagctgtgccaggtattagcagtgggacttcagttaggttactttacctaatgtgcctcagtttctcatctctaaaaataagaataataatagtctattaataattattattacatatcacataatataaatcttatacatagtataataataatgaataataatagcactggcc

SEQ ID NO: 906 - DNA, 8382 bp, Homo sapiens
gcaggattcgaggcacaaacccagcagcctcaacctagttcatggaggagcctcgcggggtcctggccaagcaagcccgcccctctggtgggaagagcggcgcctaggtggagggtggctgccgcaggagtggacatgaatgctggctttcagagagaacagcgtttcagttttggtcatcggaagtggtgccttcagcacagaagaagagcgtgatttctcctccaaggccgttgatctccaacccagaactaaaggggagaagagccacccccagcatccagcgtggcatctcttgtgccaggaccagggatgactgggccatggacacagatgtctccaaccttcaaccgtttgcatagcacacgggggactcgtgggggccacctgccactgccagctgaaacaatacaatggcaatactgacatccttcatgacgttttcccgacagacattcaggcagaaagtgctggtgcgttttctgtctgcaaagtagagggccatgcctcaccaatagaatagcgtgggccctgatgacctgctccgagtccactcacagccagtgacacttgcaaaaaactcccaaagccgtcttgggtttggctcccacagctcttgaccaatgtggccaaagctggacacctccttgggacactgggattattcataaatgcagcccgccctgactctccctgaatagcatctgaagtctttgtgaaggtcatggatcctgaacaaagtgtcaagggcaccaagaaggctgagggaagtccccggaagcggctgaccaaaggagaggccattcagaccagtgtttcttccagcgtcccatacccaggcagcggcacagctgccacccaagagagccccgcccaagagctcttagccccgcagcccttcccgggcccctcatcagttcttagggaaggctctcaggagaaaacgggccagcagcagaagccccccaaaaggccccccatcgaagcatccgtccacatctcacagcttccgcagcaccctctgacaccagcattcatgtcgcctggcaaacctgagcatctcctggaggggtccacatggcaactggttgaccccatgagacctggaccctctggctccttcgtggcccctgggctccatcctcagagccagctccttccttcccacgcttccatcattccccccgaggaccttcctggagtccccaaagtcttcgtgcctcgtccttcccaggtctccttgaagcccacagaagaggcacacaagaaggagaggaagccccagaagccaggcaagtacatctgccagtactgcagccggccctgtgccaagcccagcgtgctccagaagcacattcgctcacacacaggtgagaggccctacccctgcggcccctgtggcttctccttcaagaccaagagtaatctctacaagcacaggaagtcccatgcccaccgcatcaaagcaggcctggcctcaggcatgggtggcgagatgtacccacatgggctggagatggagcggatccctggggaagagtttgaggagcccactgagggagaaagcacagattctgaagaggagactagtgccacctctggtcaccctgcagagctctccccaagacccaagcagccccttctctccagcgggctatacagctctgggagccacagttccagccacgaacgctgttccctgtcccagtccagcacagcccagtcactcgaagacccccctccatttgtggaaccctcatctgagcaccccctgagccataaacctgaagacacccacacgattaagcagaagctggccctccgcttaagcgagaggaagaaggtgatcgatgagcaggcgtttctgagcccaggcagcaaagggagtactgagtctgggtatttctctcgctccgagagtgcagagcagcaggtcagccccccaaacaccaacgccaagtcctacgctgagatcatctttggcaagtgtgggcgaataggacagcggaccgccatgctgacagccacctccacccagcccctcctgcccctctccaccgaagacaagcccagcctggtgcctttgtctgtaccccggacgcaggtgatcgagcacatcacgaagctcatcaccatcaacgaggccgtggtggacaccagtgagatcgacagcgtgaagccaaggcggagctcactgtccaggcgcagcagcatggagtccccaaaatccagcctctaccgggagcccctgtcatcccacagtgagaaaaccaagcctgaacaatcactgctgagcctccagcacccgcccagtaccgccccccctgtgcctctcctgagaagccactcaatgccttctgccgcctgcactatcagcaccccccaccaccccttccgaggtagctactccttcgatgaccatatcaccgactccgaagccctgagccgcagcagtcacgtgtttacctcccacccccggatgctgaagcgccagccggcaatcgaattacctttgggaggggaatacagttctgaggagcctggcccaagcagcaaagacacagcctccaagccctcggacgaagtggaacccaaggaaagcgagcttaccaaaaagaccaagaagggtttgaaaacaaaaggggtgatctacgaatgtaacatatgtggtgctcggtacaagaaaagggataactacgaagcccacaaaaaatactactgctcagagcttcagatcgcaaagcccatctctgcaggcacccacacatctccagaagctgaaaagagtcagattgagcatgagccgtggtcccaaatgatgcattacaaactgggaaccaccctggaactcactccactgaggaagaggaggaaagagaagagccttggggacgaggaagagccacctgcctttgagtccacaaaaagtcagtttggcagccccgggccatctgatgctgctcggaaccttcccctggagtccaccaagtcaccagcagaaccaagtaaatcagtgccctccttggagggacccacgggcttccagccaaggactcccaagccagggtccggttcagaatcagggaaggagaggagaacaacgtccaaagaaatttctgtcatccagcacaccagctcctttgagaaatctgattctctcgagcagccgagtggcttggaaggggaagacaaacctctggcccagttcccatcacccccacctgccccacacggacgctctgctcactccctgcagcctaagttggtccgccagcccaacattcaggttcctgagatcctagtaactgaggagcctgaccggccggacacagagccagagccgccccctaaggaacctgagaagactgaggagttccaatggccccagcgcagccagacacttgcccagctcccagctgagaagctgccacccaaaaagaagaggttgcgcctggcagagatggcccaatcatcaggggagtccagcttcgagtcctctgtgcctctgtctcgcagcccgagccaggaaagcaatgtctctttgagtgggtccagccgctcagcctcgtttgagagggatgaccatgggaaagccgaggcccccagtccctcatctgacatgcgccccaaacccctgggcacccacatgttgactgtccccagccaccacccacatgcccgagagatgcggaggtcagcctcagagcagagccccaacgtttcccattctgcccacatgaccgagacacgcagcaaatcctttgactatggcagcttgtccttgacaggcccttctgctccagccccagtggctccaccagcgcgggtggccccgccagagagaagaaaatgcttcttggtgagacaggcctctctgagcaggcctccagaatctgagttggaggttgcccccaagggaagacaggagagcgaagaaccacagccctcatccagtaaaccctctgccaaaagctcattgtcccagatttcctctgcggccacctcacatggtggacccccgggaggcaagggcccagggcaggacaggcccccattggggcccactgtgccctacacagaagcactgcaagtgttccaccaccccgttgcccagacacccctgcatgagaagccatacctgcccccaccagtctcccttttctccttccagcatctcgtgcagcatgagccaggacagtctccagaattcttctccacccaggccatgtccagcctcctgtcctcaccatactccatgcccccacttcctccctccttatttcaagccccaccgcttcctctccagcctactgttctgcacccaggccaactccatctcccccagctcatgcctcacccagccaacatccccttcaggcaacccccttccttcctccccatgccatacccgacctcctcagcactgtcttctgggtttttcctgcctctgcaatcccagtttgcacttcagctccctggtgatgtggaaagccatctgccccagatcaaaaccagcctggccccactggcaacaggaagtgctggcctctcccccagcacagagtacagcagtgacatccggctaccccctgtggctcccccagccagctcctcagcacctacatcagctcctccactggccctgcctgcctgtccagacaccatggtgtccctggttgtgcctgtccgtgttcagaccaatatgccgtcctatgggagcgcaatgtacaccaccctttcccagatcttggtcacccagtcccaaggcagctcagcaactgtggcacttcccaagtttgaggaacccccatcaaaggggacgactgtatgtggtgcagatgtgcatgaggttgggcccggcccttctgggttaagtgaagagcaaagcagagctttcccaactccatacctgagagtgcctgtgacattacctgaaagaaaaggcacttccctgtcatcagagagtatcttgagcctggaggggagttcatcaacagcagggggaagcaaacgtgtcctttcaccagctggcagccttgaacttaccatggaaacccagcagcaaaaaagagtgaaggaggaggaggcttccaaggcagatgaaaaacttgagctggtaaaaccatgcagtgtggtccttaccagcaccgaggatgggaagaggccagagaaatcccacttaggcaaccagggccaaggcaggagggagctagaaatgctgtccagcctgtcctcagatccatctgacacaaaggaaattcctcccctccctcaccctgcattgtcccatgggacagccccaggctcagaagctttgaaggaatatccccagccatctggcaaacctcaccgaagagggttgaccccactgagcgtgaagaaagaagattccaaggaacaacctgatctcccctccttggcacctccgagctctctgcctctgtcagaaacgtcctccagaccagccaagtcacaagaaggtacggactcaaagaaggtactgcagttccccagcctccacacaaccactaatgtcagttggtgctatttaaactacattaagccaaatcacatccagcatgcagataggaggtcctctgtttacgctggttggtgcataagtttgtacaaccccaaccttccgggggtttccactaaagctgctttgtccctcctgaggtctaagcagaaagtgagcaaagagacatacaccatggccacagctccgcatcctgaggcaggaaggcttgtgccatccagctcccgcaagccccgcatgacagaggttcacctcccttcactggtttccccggaaggccagaaagatctagctagagtggagaaggaagaagagaggagaggggagccggaggaggatgctcctgcctcccagagaggggagccggcgaggatcaaaatcttcgaaggagggtacaaatcaaacgaagagtatgtatatgtgcgaggccgcggccgagggaaatatgtttgtgaggagtgtggaattcgctgcaagaagcccagcatgctgaagaaacacatccgcacccacactgacgtccggccctatgtgtgcaagcactgtcactttgcttttaaaaccaaagggaatctgactaagcacatgaagtcgaaggcccacagcaaaaagtgccaagagacaggggtgctggaggagctggaagccgaagaaggaaccagtgacgacctgttccaggactcggaaggacgagagggttcagaggctgtggaggagcaccagttttcggacctggaggactcggactcagactcagacctggacgaagacgaggatgaggatgaggaggagagccaggatgagctgtccagaccatcctcagaggcgcccccgcctggcccaccacatgcactgcgggcagactcctcacccatcctgggccctcagcccccagatgcccccgcctctggcacggaggctacacgaggcagctcggtctcggaagctgagcgcctgacagccagcagctgctccatgtccagccagagcatgccgggcctcccctggctgggaccggcccctctgggctctgtggagaaagacacaggctcagccttgagctacaagcctgtgtccccaagaagaccgtggtccccaagcaaagaagcaggcagccgtccaccactagcccgcaaacactcgctaaccaaaaacgactcatctccccagcgatgctccccggcccgagaaccacaggcctcagccccaagcccacctggcctgcacgtggacccaggaaggggcatgggccctctcccttgtgggtctccaagacttcagctgtctcctctcaccctctgccccctgggaagagaactggcccctcgagcacatgtgctctccaaactcgagggtaccaccgacccaggcctccccagatactcgcccaccaggagatggtctccaggtcaggccgagtcaccaccacggtcagcgccgccagggaagtgggccttggctgggccgggcagcccctcagcgggggagcatggcccaggcttggggctggccccacgggttctcttcccgcccgcgcctctacctcacaagctcctcagcagaagcccagagacctgcgcctccccgtggcagaaggccgagtcccgaagtccctcctgctcacccggccctgctcatcctctctcctcccgacccttctccgccctccatgacttccacggccacatcctggcccggacagaggagaacatcttcagccacctgcctctgcactcccagcacttgacccgtgccccatgtcccttgattcccatcggtgggatccagatggtgcaggcccggccaggagcccaccccaccctgctgccagggcccaccgcagcctgggtcagtggcttctccgggggtggcagcgacctgacaggggcccgggaggcccaggagcgaggccgctggagtcccactgagagctcgtcagcctccgtgtcgcctgtggctaaggtctccaaattcacactctcctcagagctggagggcggggactaccccaaggagagggagaggaccggcggaggcccgggcaggcctcctgactggacaccccatgggaccggggcacctgcagagcccacacccacgcacagcccctgcaccccacccgacaccttgccccggccgccccagggacgccgggcagcgcagtcctggagcccccgcttggagtccccgcgtgcaccggccaaccccgagccttctgccaccccgccgctggaccgcagcagctctgtgggctgcctggcagaggcctctgcccgcttcccagcccggacgaggaacctctccggggaacccaggaccaggcaggactcccccaagccctcaggaagtggggagcccagggcacatccacatcagcctgaggacagggttccccccaacgcttagcctctctccaactgcttcagcatctggcttccagtgtccagcaacagacgtttccagccactttcctcgaatcatcccacttcctcagccccatctgtccctccgtccaggagctctcacggccccatctgttgtaccttcccatgtatgcagttacctgtgcctttttctacaccttttgttgcttaaaaagaaacaaaacaaatcacatacatacatttaaaaaaaaaacaacaacccacgaggagtctgaggctgtgaatagtttatggttttggggaaaggctgatggtgaagcctcctgaccctccccgctgtggttggcagccacccaccccagaggctggcagagggaaaggggtacactgagggagaaaggaaaaggaaacttcaaacaatatagaattaaatgtaaaaggaagcactcctgtgtacag

SEQ ID NO: 907 - protein, 2392 aa, Homo sapiens
MDPEQSVKGTKKAEGSPRKRLTKGEAIQTSVSSSVPYPGSGTAATQESPAQELLAPQPFPGPSSVLREGSQEKTGQQQKPPKRPPIEASVHQLPQHPLTPAFMSPGKPEHLLEGSTWQLVDPMRPGPSGSFVAPGLHPQSQLLPSHASIIPPEDLPGVPKVFVPRPSQVSLKPTEEAHKKERKPQKPGKYICQYCSRPCAKPSVLQKHIRSHTGERPYPCGPCGFSFKTKSNLYKHRKSHAHRIKAGLASGMGGEMYPHGLEMERIPGEEFEEPTEGESTDSEEETSATSGHPAELSPRPKQPLLSSGSSGSHSSSHERCSLSQSSTAQSLEDPPPFVEPSSEHPLSHKPEDTHTIKQKLALRLSKKVIDEQAFLSPGSKGSTESGYFSRSESAEQQVSPPNTNAKSYAEIIFGKCGRIGQRTAMLTATSTQPLLPLSTEDKPSLVPLSVPRTQVIEHITKLITINEAVVDTSEIDSVKPRRSSLSRRSSMESPKSSLYREPLSSHSEKTKPEQSLLSLQHPPSTAPPVPLLRSHSMPSAACTISTPHHPFRGSYSFDDHITDSEALSRSSHVFTSHPRMLKRQPAIELPLGGEYSSEEPGPSSKDTASKPSDEVEPKESELTKKTKKGLKTKGVIYECNICGARYKKRDNYEAHKKYYCSELQIAKPISAGTHTSPEAEKSQIEHEPWSQMMHYKLGTTLELTPLRKRRKEKSLGDEEEPPAFESTKSQFGSPGPSDAARNLPLESTKSPAEPSKSVPSLEGPTGFQPRTPKPGSGSESGKERRTTSKEISVIQHTSSFEKSDSLEQPSGLEGEDKPLAQFPSPPPAPHGRSAHSLQPKLVRQPNIQVPEILVTEEPDRPDTEPEPPPKEPEKTEEFQWPQRSQTLAQLPAEKLPPKKKRLRLAEMAQSSGESSFESSVPLSRSPSQESNVSLSGSSRSASFERDDHGKAEAPSPSSDMRPKPLGTHMLTVPSHHPHAREMRRSASEQSPNVSHSAHMTETRSKSFDYGSLSLTGPSAPAPVAPPARVAPPERRKCFLVRQASLSRPPESELEVAPKGRQESEEPQPSSSKPSAKSSLSQISSAATSHGGPPGGKGPGQDRPPLGPTVPYTEALQVFHHPVAQTPLHEKPYLPPPVSLFSFQHLVQHEPGQSPEFFSTQAMSSLLSSPYSMPPLPPSLFQAPPLPLQPTVLHPGQLHLPQLMPHPANIPFRQPPSFLPMPYPTSSALSSGFFLPLQSQFALQLPGDVESHLPQIKTSLAPLATGSAGLSPSTEYSSDIRLPPVAPPASSSAPTSAPPLALPACPDTMVSLVVPVRVQTNMPSYGSAMYTTLSQILVTQSQGSSATVPKFEEPPSKGTTVCGADVHEVGPGPSGLSEEQSRAFPTPYLRVPVTLPERKGTSLSSESILSLEGSSSTAGGSKRVLSPAGSLELTMQQQKRVKEEEASKADEKLELVKPCSVVLTSTEDGKRPEKSHLGNQGQGRRELEMLSSLSSDPSDTKEIPPLPHPALSHGTAPGSEALKEYPQPSGKPHRRGLTPLSVKKEDSKEQPDLPSLAPPSSLPLSETSSRPAKSQEGTDSKKVLQFPSLHTTTNVSWCYLNYIKPNHIQHADRRSSVYAGWCISLYNPNLPGVSTKAALSLLRSKQKVSKETYTMATAPHPEAGRLVPSSSRKPRMTEVHLPSLVSPEGQKDLARVEKEEERRGEPEEDAPASQRGEPARIKIFEGGYKSNEEYVYVRGRGRGKYVCEECGIRCKKPSMLKKHIRTHTDVRPYVCKHCHFAFKTKGNLTKHMKSKAHSKKCQETGVLEELEAEEGTSDDLFQDSEGREGSEAVEEHQFSDLEDSDSDSDLDEDEDEDEEESQDELSRPSSEAPPPGPPHALRADSSPILGPQPPDAPASGTEATRGSSVSEAERLTASSCSMSSQSMPGLPWLGPAPLGSVEKDTGSALSYKPVSPRRPWSPSKEAGSRPPLARKHSLTKNDSSPQRCSPAREPQASAPSPPGLHVDPGRGMGPLPCGSPRLQLSPLTLCPLGRELAPRAHVLSKLEGTTDPGLPRYSPTRRWSPGQAESPPRSAPPGKWAGPGSPSAGEHGPGLGLAPRVLFPPAPLPHKLLSRSPETCDWQKAESRSPSCSPGPAHPLSSRPFSALHDFHGHILARTEENIFSHLPLHSQHLTRAPCPLIPIGGIQMVQARPGAHPTLLPGPTAAWVSGFSGGGSDLTGAREAQERGRWSPTESSSASVSPVAKVSKFTLSSELEGGDYPKERERTGGGPGRPPDWTPHGTGAPAEPTPTHSPCTPPDTLPRPPQGRRAAQSWSPRLESPRAPANPEPSATPPLDRSSSVGCLAEASARFPARTRNLSGEPRTRQDSPKPSGSGEPRAHPHQPEDRVPPNA

SEQ ID NO: 908 - DNA, 68820 bp, Mus musculus
  misc_feature (1)...(68820): n = A,T,C or G
agagtgtggtttgctcccccagagtgtggctatgctcttgtgctcagggaacaccccaaacaccaactaccagctcccacctctcctttttcaaggtctcactatgtagctcagactgtcttggacgtcactctgtagaccaggctagcctccatctgcctctgccttcctagtgcggagattaaaggtatgcaccacttcatccggtttctccagacttctctgaacagtcacacctggctctggtcctgtctgtccgactacaggctccacggaattcttccctggtcctgagccagtgccgaccacctgcagggcggttgtcctccctctgttctctggtttcctgtctctctagttgtttctccttggagtttctcctttgcgcacgctggcttggctcttgctcaaaggcctgccctgccttcctcttctcacttgccatgttcttccagaaccatgtatgtattggttgttttgttttggtcattttttttaaatcattttgtgtgtgtgtgtgtgtgtgtgtgtgtgtgtgtgtgtgtgtgtgtgtgtgtgtatgagagagagagagagagagagagagagagagagagagagagaatatagagtcagttctttccttccacttttatgtagaaactcaggtcaccagacttgcatagcaggtacttttaccccagtggccttatatattggctgtttgcttgtttgttttgtttgtgacaggtctcatgtatcctaggctggtctcaaactgactatgtagttgagggtgaccttgaacttctgatcctcctgcttttgcctcctgggttttgggattacagacatgcaccacaagcctgttttataaagtgctggctacagaacccagggattacccagggctctgagcatgctagataagtaccctacccactgagctataccctcagcccctctccctgggccatcttatccaccccattgactttaattactggttgttttccgcagagccccagacctacttatgcaactgtctttggaatgttccacacacatcaccaactccccatgtgcagaatgaaattatcttcttgcccacaaacccactcttcctcctgtgtgacctacacagctggtggctccaccctttgccctattggttcaggcaaatacatacacatatcttctgagccaccctctcctctccatccctactatatcatcctctttagcttatattattgcatgtttcccctccccctggaatagaatctcaggttggtcactctgtgggacgtttggtcagctggtcctcctgcttcctcctgttcctatggaatcaccacacaaacccagggcttcgtgcatgctaggatagcagtgtattaaccgagccacagcagtgcaacctgctccttagactctcggtgtccattttatctgtctgcagcttatgattctttctcaagatgttagggataaatccatttctcaccctttctaagtttctagaagattcctacattccttcattcaaggtgcccttcttcaccttacatctctctgacactcttctacaggaagatcttttaaaattttgtttttagggctggagaaatggttcaatggttaagagcactgggtctgggttcaatgcccggcacccacatgtcagctcacatccataactccagtttcaggggatctgacactctcacaccaatgcatgtaaaatacaattaaataattgtgagagtaaaaacatttgggtacctgttacagactgaaaataggctcaagccaacacagggctcaagagtggacaacccatttttatttttggcttccattgagggaattgaagggataggtgtgccacatgatcaatttcaaaagcgttttctctcagagaatgttctgaccttttgatcgtactaacaacagatccctggcctgtcgcctcagctttctctctaaggcattctcctgatggccaggccttcatttaaattcagtcccagccatcagctcctaggcttgttggtttgctttttgagctgtggtcttgctatgttgcccaggctggtctccagctcctgggctcaggcaatcttcctgcctcagcctccaacatacctgggactacaagcttgcactaccatgctcagctttggtaaagcagaattactactgtgtatcataaagcagatgcaagatattttacatccttaatatagtgtgtgtgtgtgtgtgtgtgtgtgtgtgtgtgtgtgtgtgtgaaggtcataggaactccatcatgtgagttctaagggactgaatttagtttgtcaggcctggtgtccagcacctttacctgctgagctatcactgctccgaatgtgaactttcaagtacattacttgaccaagatgtggttggtgctacacacctgtaatctcagcactcaggagatggtagagactggaggatctgaagttcaaggtcaccccctgctatatgagtatttgagaccgtcctgggttagacactttgtcaaaaacaaacaaacaaacaggaagccacatgttttctagtgaaggccttcaggaggggttaccaggatcgccagcctatgagtcaacacttgaatcacagaaatcaattggacacaccgtagctttttggagatgaataaggctaacctcctttaacagaggtcagtgtgttaacctgcgggccctactccagaacagcgtgagcctacagccaggtcagaagaggcctgggaagctgcattctctcaaacttcaagaaccaaagaacagtgctgctgccaatggatgacacatctgtttcctaggaagaaacaaagccacaacaggactgtgcagtaggtgtgcatggtgatttgcaaatctgggccacttcctgttctgaaaccagttgtgaaatttgtttgggcaagttgcccaaccagggagtcaagggaagttgccaacttgacttctggcctaaagacattctttgcaggtctattgggccccactcagctgagtatttcaggaatatggcagctaaagaaagggctcgaggttgggtgtgtaacagccaatcatcgtcactggtgaacagagtcaggtgaagaaacttcccttttcttaaacattacccatctatcgatctctctatctctctatctctctatctctctatctatctatctatctatctatctatctatctatctatctatctgtgtgtatgtttgcagtgtgcgtaggggacacatgggtgccacaatgtgcacgtggaggtcagacgacaactttcaggagtcaatcctccccttccaccacgtggttcctgaggatcaaacttggctcatcacatttggcagcaagtgccctacctgttgagccatggggctggcccagttgagctttcgtttgtttatggtctctgtctctgtctctctctggatctggagagagaactcccactgctgacacgttcccaggtgatgctgatgctgctcatctggtggctaaggatctctgaacttgagcaaggcagagtaggatgacaccaccctgatgctgatggccttgtcagggagctgtgtcagtgtgaaccactgccctgcttctgaatttcctgttcagtgagaataaactattatttgtttaagcccagttggattgattatcacttccatttaacaggtttctgaacttggagctgggaatgtagctcaactggtatagtttttcctggtatggacaacgcactgggtttggtgtccagcactgcgtaataagccagctttggtggctcacatttgtagtcctagtattcgggagacaaggagcaggagttggaggtcatacttgggaagctagtaaattcaaggccagcctgggctacttgcgaccctgtgtttcaaagcaaacaacaaataaaacccaagcccaaaatgaaataaatcactcaagaggaccggtgagaagcctcagtgagtagaagcgcctgccttctaagcctggccacttgagttcaatccctgggacccaacctaatgggggaaggaaagagctgactctcaaattgtcctttgacctcatttaaaaatcattttaaaaacaattcaaggggactggagagatgcctgagcacttaagagcactggcgaggactgtgctacaattcccagcacacacatggtggctcacaaccacctataactccagttccaagggacccaatgttcttttctggcttctaagggcatcaggtatacaaatgacacacacacatacaggcaggcaaagcactcccacacataaattttttaaagaaaaaaccttaaacctcaagactcaatgtacagggtttataacgtcagccagccagcactgtccacccacccccacctctatgtacttgaccccctccactccacccccctcctttgaagtaactattttcaacttttaaggagcttgcttttgtaattgaggggtttgactgaacagcatgttaaattaccctgatttgccccccatctttgtttatctctggtccattcttcatgaccttcaccttgggctcgaccattatgtaactgggaagagacgttatctccgttttccatagttggtgtatctctctgcattgactgtttttttttgtttgtttgtttgtttggttggtttttttttttttttttttttttttttttggatagtgtaggcccaggaggtggtttgggcaggagccaatcaagcccatggccaatgtgaaagaggcagctgaagagagttctaagaagagccctgctgtgctgttatcttgaggccagcatcagcagaaagctgtgaccctcaaactctggggcaacagggagggttctggaagatctcctgtagtggtgtgaaaaggtccttgaaggaatgctgttgtcagcacaggaaggaaatgcctctggcagcaggaaaaacaagcagagaaaccaagtaactcagcattgctttgttttcctgcctgtgcccattgttgactaatggctgagcacaaccagaaccttgccttccagggatctgtctgatgctctccactggagtgactctggggcccagggagggatgaagggcagatagagtgtggggggcattagaacatagcaacagggggagctacaattttgaaagcaagaacagagagaaaagaaaagaaaagaaaagaaaaggaaagaaaagaaaagaaaagaaaagaaaagaaaagaagggaagggaagggaaggaaaggaaaggaaaaaaggaaaggaaaggaaagaaaagaaaagaaaagaaaagaaaagaaaagaaaaaagaaaagaagggaagggaagggaagggaggggaggggaggggaagggaagggaagggaagggaagggaagggaaaggaaaaaaaagaaaagaaaaggaaagaaggaaagaaactcccttgttgttccacagtgcttctagaacagcagggtggctagcttggaattctaggttggcaactctttctctcagaatcttgaaggcaccatttcatggtctcctggcttcccctgctgtttttgagaactctgtgtcattctccttcccattccttctacatgtgactggtttttcctttctggaaacttctggtctcctccccaaccctccgatgttttgctttttacagtttatatgctgtggtgtgaggtgatttcctttcattacacttcagtgtctctcccaggaagccttggtcaggtgtgtttacccaatcccttacaagaccctgaaaatgcaggagctattgatacagctctcggacggatgctgtctgttcttgcatgtggctggagatcatgctagcacaatcaccctgccatggtggtagcagtgagttgctgagctatagtcaatacacagctggtccagcctcctctcccaggatccatatcactgaatagttatagggcagagaaaggaagacaaagaagaggcttgatagagctggggccacacgttgtcctaaggaaaatggcagacttgcatagcatgaaatcctggtattggaactgggtttccacatcgacggggaaaggatcaaaggccagccaacaggctcacagggaagacttcatgagactgcccacaaacagggatggtttggggtccagagtacaatgtgtaaacagatgaggagaagccattctctgtctggaaggaaagggtgattgctgatcttctggaatcccaagtagtgtggacatcaggacctagcgccaccaagtaaagcaccgactctgtcctcgtgggcactttcagcagtggcaagcagaggcacttttgagagtcaggctgtggaagtgggcatgtgggaattccagcaggagagaagggacaggcaagcaaggctggctcacagctggttgcttcggtacagccaagttctcaaggctgacagtgaagtcacagcacattgtcacatcttaaaaaaaaaaaagcgagagttagctggagttagcccaataggctctgagatccacagtgaatttctgagattcactggagacccacagttcatttactgtgacagctaacgaagagatgacaggaaaatagaaaattagtccagctcgcttaatgacaaagccatttaattggtattaccctaaattggtaccctgactaaccagtgggttggaaactattttagttcaatgtatgactcaagagattttatctcctagctagaagatgctgggatgaaaagctccacgtggcagcagtccaaacatgttccccacagcactactagagtcacggtctgggcattttgctgcagagctcactctagcatggcagctcaggaaaaaattcatttctgagccaggtggtgcaaggtactctgctacaaaaataaacaagaaagggaacagataagtacatatgcctcgagtattatgaattttttctttattgctcttttgtttgtttgcttgcttgctttaaaacaggatctcctgtaacctaggatagcctaatgtccactatgtagctgaggctagccttaaactcctgtgctacctgcctccatctaccaagtgctggggtcacctatgtgccaccatatctggctttgatgaatcctttttatgtaggatcagctaagttacaatttggtgagaaaacaacttaataacttaaagcaagaccttttgttgttgttgttgttgttgttgttgttgttgttactcattacttctgatctttttctgattagtggcgagctcttgctaaattcaggctttggttacaaagcctaacctggaacttctagggctgcccttgcagggaccaggagcaagggcatgttctctacagtcggtgcttcagtctgtcttgactgtctgtcctttgtggatagtgtgttccagtcaaaacagcaaattaaggcttcagacataaagcgacatatttctgcttggcccattgactatgtctgactacaaacagatcaggaaataaaccctatcatggactgataaggccaaaagccagacatatttagcaataggtgttgattgtctaccacttgttttgtgctgagagttgttctaaatgcgttgcaggtttcagccctgagaagctttgcatcaatcccaggaaacaggtagttagcaccattatcattcctactgcatacatgaaataccaaggcaagaagttaagcaacctgccaaagccacacaaacagaattcaaattttggatctcagcccaggtgatctgacctcatggtatatgtgcctcgtctccatactgtgcagccaaatggaaggaaatgagaagctgtcaaaggctttttcaacgggtgagcatggttaagtgagatcctcgtacaagaggagtcaggtggagcaaagccacccgtgaatgactccagcgccagaaaattggatgcccttttcctggactccaagggcacctgatctgttatgtgcagacccacatatagacacacatacacatagttaaaaattaaaactaaatcttaaggccaacatattgcaatgcctctaatcctagcactcaggaggcagaggcaagcagaactttgtgaggtcaaggccaacctggactacagagtgaattcaggccacccagggctatatagggaggccctgtctcaataaaatcaaataaaaatttaaaaacgactaagagaatatcaaatctgatggacctgtcttaggaaaatactatatgaacttggacgtttatgaaagtaagttctttgagacttcactggaatgaaaaggtttggaacaggaataaattattctgattaataatgtaacaaatattttaatttccctttataatatataaatattatatattacaatatataataaataaatatataatataaacattttgaggggagcctggtcttgggagaaagtagagatgaacaagactgctgtcttagaggcaaataaacactttgtcttgctggcctccctggtctattactctagccttcagaagaatcccttaagagcaaatatcaggaagtagcgttctcttcccctttagcacatcctgttttttctcagtctcttttaagaatttgatgagtgaagggacggaatgcatacacaggaagatggccgtgggttcaagacactatttgtaacaagagaggctttggaaaataatacctaataaccatttttaagtagctgcttattccatgttaccctataactggctctcccccaaacaacctgagagatggctcagcaggtgagagagtttggtaatctctcataggaccctggttccttccccaacacccacatcacacaccctcatccatcagctgaaactccagcttcaggtactgcaatgccctcttctggcctccttggacacctacacacacacacacacacacacacacacacacacacacgcacgcacacgcacacgcacacgtacgcactcacacacgcacgcatgcacacacacgcaagtaaaggaggctaggtatggtggcacatacctttaatcccagcactttggaggcagttctctgttagttcgaggctatcctaatctacaatataaagttccaggccaccaagggctacttaggaagaacctgttcaaaaaaaaattttttttaaaggaaagaaaagttctgcctagacactagtcagagcgatgctcaaaaagggcagtagtcacagagaagactaatgtatatcagcggcaggaggcattccaagttagaagtgatcacgagggagggtgtaatgtctctttaactcgggtcagagggtgagtccttttgtctcttgaaggaaagactaacctaaaggagtctgggatagccacaacccttgtattatataaggataataaacacacatcttataaaggttgctgtgaagagcatactgtgataattgatagaaagcgcttagagcagtacatggcacacagtatgagctctgtaaatgttggtcgttcccttcactttattctcttcactctcctccctctccacccggcttcattcattcttttccaagggcacgcagggggcgtgtcctccctcccgccgcttccacctaagccccgcccccggctcttcccggattggttcctaggaggcggagccaaggggagagcccagtgcagcgcggtgggcggggcgcatgcgcgggttgggctgggtggaggaggagaggaagagctgccggaagtaggcggtggaggtggcggctgagctggtcgcagctgccagggaaaccgaggcgggaagcacagcgggcagaccctcaacactcggggtcaagtgtgcgtcccgcacgcctgaagccgggagctcgctccacctaggccacttctggggtcccgcagcctccgcgagtccctgccttgcccgaagcccgccagggggcgccgcgctgagggnnnnnnnnnnnnnnnnnnnncaggggttcttggggggtgcagggggcgcgtcgccctctgcccccgccggcaccctggccatgacaggcaagtcggtgaaggacgtggatcggtaccaggcggtcctggccaacctgctgctggaggaagataacaagttctgtgctgactgccagtccaaaggtaacgcatccggggcgccggcggggggccagctgcggggcggcggcgtggcgatgagctgcgatggcctgagtggggagggggttctggagctcagggcgagtcctcttcgtatgaccacgcgagccaccctcgctcatgagcttgctgggtttcctcgggcttgggacttggggtttggtgtgggcgagtgtgtgtgtgtgtgtgtgtgtgtgtgtgtgtgtgtgtgtcagcgaagtggggatgatatagtggggggtggggttgcccggtgtgttcaggtgagactgtctatgttgcagactctgaatggcttctgggctcgctgtcatgcagagctggcagccttttacttggcaaagctgtgggtgagctgcagtgtggtgggggtggcggtgggggtgacgaggaggaaggtgagatgactaagagaaaaactgtcgaaatgatatttaaaggtggcattccttgctgtctgctatgtcgttagcagctcctgtcattttaccaccttgttgagctcagaccgagtgcttaggtggctttcttcacccaggtcgtgtgcactgagaaacagctaccttatgcagtgacacagtgcggatttctaggtagtctagcctgggttgtggaggcctcatgcgtgtgtggtgagcgaaactagcagacctggactgtagtgcaggacccgttcaagcagggagaaaaggaagcaaggaattcccccaattcgttatttccctggtgattacacctttagagaggaaatagaaattggccacaaccacttagcctttgttttctgtgtctgtaaaggttcatgctgtgttacaattaaaggtcaatatggtagaaaatttactagtgaattctgtacagctttgtaggtaggagcagctataattgggagggggtatttactttagttcatttcctgaatttgccatgtagcatatgggtataaagtagtataaagcattcagatgtgtgtgtgtattaatgttgagaaaagcaatagatacttagcccatacttcatgtgattatggtttattttagagtaaggttatgtaaggagggcgcaagaatgatgatgcattgatttagactcctagtaataaattttagtgacctctatcagtaggcaaatgcagtgaactgtcagcaaagcaggtccccagacttctctcgagaatttttgcgttaacaggagttcaatttatgttgaggagtcgaaatttcttgtagcttgattcttgttagatctactggaaggtttggtttacagtgtaggagcacctttggtctactcaaatcctctgatgtcctcattgacaattttaagtcgcagcgaggcatccactgagcagaaaccattgttgatgatttttagaaccgccccctcccctgtactcatgttgtttgtatgcttactcatcccaataacatataccatggggaagagacacgttaatttaccaggtcttcctccaaatctcccattgccctttattaatagccttactagatataatcagacatagaacttcgttaattcctgatgagaactagtaactggggcctgcgatagggctcagtgaataaaggtgcttgccactaagactgacaacctgagtttgatccccaggactcacagggtaagaggagagaaccagctcccataaattgtctcctgacctccacgtggactctagtacatacatgtacaatctccacaaagttaataattaagatgtaaaaacagacgacaccaacaacaaagcctagtagctgtctgccactgatactaaaaccttggatcctgaatgttctgaagttagaaattctcttcaacgcgtttgccactattaaaaaaagagatgcccacgtgtccattatctttcagttctgtcaaacaggcttttgcagaggcctgtttatctagctgccgaatgttcagccctgtctgccggttaacccctccttcattctcttcctcttttccactttcaggttttgtgatgaactcgtaggcagttctcagagggtaggaaagagagatatttgcattagtagatcatgacctgctcagccctgataaaaaggaccagcagttggtggaagagttagaagactgttcactgaaataagatttgagtttgagtttacttttctgttttcctcttgtccttttcagaaaattgagagctcaccagacaaggtctggagagttcatctattagtatttagtgtattgatgttgcctggactacagacctctaagtggatacttttgtaatgttccaaaatagctctttggcaatgaattctcttttttaaaatttaatattatgttttaatttatttatttgtgtgtgtgtgtatgtgtgtgtgtgtcagagaacaacttccaccatgtggggaatgaactcaaatggtcaggcctgctggcaagcatctttccttacccaccgagccatcttgtcacctgatgtttctatttatttattttcaggaaaaattatgtttcctaaacattttatttttattttaaatcatatgtatatgtgagtgcagtgtccatggatgccaggagagggtgttgatcccttggaactggactcacaggtgattaggattcatctgaggtgggtgctgggaactgaactcaggccttttaaagaacactatgaactctgatccacagagtaacttttctagtcccctgactcttctttttaaaatcatgtttaggagtgatacttgttagttgatccttaaaataatgtcattcagcactgggatagagactaagcaggcacctttccctttattcagtagaaggcctgttgagtcaggtttccgaatgtcctggactgctttgacactgctttgtattaaaaaaaaaaaaatgccaatgcttagtggttgtggtgcctgtcattagtcccaacttgagaggggaaggcagggggatctctgtgaattagaggccagttggtctctacagtgagttccaggacagctaaggctgttacatagagaaatcctgtgtcaaagacaaacaaaaaacaaagaagtcacaatttaaaccatctgaggtggctacccctgtaatcccagcactcaggagctggaggcaaggaaggaagataagaagttcaagtttgaggctagtctgggctatgtgagaccctgcctcaaacagttcccgttcccaaatgctatgacttattcttagcacaaagtgcagtttccttgtcatgacagcttgcaaagtaatacctacatggactgatctcagcaatgataaagttagagggtgtaccaatgttgataaatgattgataaatgaggaaaaactagtgtaagagccaggtatgtctctggtaactggctgcttgagacctggctccatcatacttccattgtacttggggtcacagtagcccaaggctgggcctttagctctgcagctccagatgtttatgaatgtgttggcattaacccattcagagactggtgtcagagggtccacctttctgatgacctgcgtactcctgtgcaccattgagacattaccagcgtcaaggtttgggagaagcagagagccgtttaatgagcagagagtagacatgggagacatgacagtgtcagggaacatatgagtgacactgaagcgccttgtgcagctctgctgtcttgagagctttgttagtttttcccggtccccttccattacatcttgtctatgaaatgtttcccctctaattacctaaccactgcctctgtttcatcttctctatatattttcacttaagtagatttcatgtggtttgaaattcaaaaaaaatcgaaaagacaacagaatgaaaaatcattgtcctaaggtgacccatagccacctttgttctcttcctgagtataaccactgttggccatttcttacctgcccttgtcctatgtttgaaacaggctggccttgacctgtagctgattaaatgaactcctgatcttccttcttaaattcctcctgttctacctccccaaagcttgcactgccggcatgcagccttgtccccaatttcttaacctgtatatctgagacgagtttacatagttttggcttgcctgggacttgctgtgtagaccagactggatgcaaacttattgtgatcctcctgtctcttcctcccaagtattttacctcacctgcctttcattttaaatgtatgtgtgtgaggatgtacatgtctcacatatgtacctatgcatgtgcactttgtgtagaagcttgatgtcgacattgggtgttttcctcagtcagtctccagtttttattggggaaaatctgttactgattctggctaacctagccaccttgttctgatgatgccctgtgtctgcctcctgtacactggggttttaggcaggctaccatgcccacctggccttcaggtaagttatggggatctgaaccccagtgctcacacttgcaggctgagtgctttacctgctgagccttctcctcagcctccctcacctgatctttgagaggtgataatatgcaaggacaaacaccatcattttctttattttgtatatgtgtgtatgtggatattaaacaatgacattaaatgtataggttttcagcacttttgtgccttggatttttcaatcaacagtataatatagacaccataatgattctctgtccatgtgcacagaatggaagctctgtaagaaagagcttccagtgtttcaaggctatacacaggctgtttttctattaagttggtggatattcttgagtgatttagaagacagctagcttctctcgtggaagttatctttgaaaagtgtgcacaagggctggagagatggctcagtgttaagagcacttttatagagggactaagattgattgccaggacctacatggtggctcacaaccatttggaactccagttccagggatctaatatcctcctctggcttccatggcttccatgggcaccagacatgtgcatattggacatagacatctatggaagtaaaacattcttacacataaaataagaataaatacattttttttgtgtgagatagggtttctttgtgtagccctggctgttctgaaactcctctgtagaccaggctggcctcaaattcaaagagatcccaagtgctaggattaaaggtgtgcaccaccagtgtctggctatttttaccattcttgattttatttattttatcttaattttattcgttgcatttttaattttatatccttaaaatactctggttactggaagccctggttagaatgactcacagtaatcccctggtccttaagccaaaaccatttcctatatatgggagttctggcagttttgcaaatgtgctctacaggacccttgaggatagtctgggtgtttcctgcttcttcaaacatgtatggaagattagaccagggaatttctttgtgtgaaggttttcaaatagctttaagttttaccttttaaaattagaaatgcgaaacattttaattgtgtgtgtgtgtgtgtgtgtgtgtgtgtgtgcgtgtgcatgtgttcacctgcgcatgctacagcacgtgtgtgaaggtcagaggacaccttgtaggaatcagttctctgtttctgctgtggatcctgagatggaactcagatgggcagctatggcaggaaggagctttagctgttgagttatctcaccagcccagtgttaacgtttgaacattaatctttagctttccttctatttgctttatatcaatggctataccattgtttcttaatgtcattccttagaatataaactttcctgtcaatttaagtatttcagctatatgtctgtggcatatgataatgcagacacttttttttttaaccttcttgaggttaaaatccaccagatgtagacagaatttctgcttcccatttccagctctcttgctgtcatatcctcctctacctaaggtcagatatctttatgagcttttatagttgatgtatcttaattctcacagtcatgattatattgacaaggtttactggaagtgatttatcaaagctaccattaaatcatttcagagtatcaatatgaaagctgttccctggggggaagggggcacttccttgtttattctgctttccttgtaaattgcaccctgtggcaaagtggaaaagagctcactgtcgactggagattcaacgttctgcgcgcgcgcgtgtgtgtgtgtgtgtgtgtgtgtgtgtgtgtgtgtacatattcagtaatgtatcctgaagtgaaatgatcacgaattcaagatcatcctgagccagcctagtttacatgaagccctgtcttaagagaccaaaataaacaacaagaaaacaccccaataaaacaaaagttttgccgggcgtggtggcacacacctttaatcccaacactcgggaggcagaggcaggtggatttctgagttcaaggccagcctggtctacagagtgagttccaggacagccagggctacacagagaaaccctgtctcgaaaaaaaaattaatcactctgtgcccaacactgtgcaagggacatatgataggattcaaagatgaagtctttgatctcaaaggttttatattctaatggggaaatagatgtataaatcagataaccatggcattatgtccaggaacagcaaaagcactgaataaggcaaaaatggcttcctcaggaagtcacagctttaaagaggccattaagctgtgtctgaaagggtacacaggctgttgccacgtgaacttagggagctgtactgtaggaaggggaggcagttatgtacagagcctctgcagggtgtgcatttgtgtgtgtgtgtgtgtgtgtattatttagggtgatttaactacatattgtgtagtgtaagggttagaatttggtagctagtcaggggccaataaaattccacctctccaggtgacttttttatggctttgagattatgaatatgcattatgctttagacccttttgtttgcatctagcactgtaggtccatctgcttctctagtgggattttaagtcttacaggcatgaaatgcttggtggttgccaagtagtccaagagacttgagcattgagcctgtatcatctgtatggcagtgtacgttcatggatacacaaatttctcttaggagagcccaatgaaatgccagcagtcgtgctgtcacctccacagccagtgctgctgtttatgaagctggacgtgcccgtactcaagcaggccacgtgtggaatatttgcaatgtcctcttgattgtgtaaggtgcttccttggtagcaaatctcacttccagataaattagaaaactacccccttcctgccattgtcatctgatgtcattatgggatgtaggtggcagctttcttgggtacagttgtctatataactgttcatcccatgagtcattgtctgtttctgttcttctttctgcctgcgaattccaacctgaaaataatctccattgtggctgtgacacagtgttcattttgtacactgcatctgttttgctgactctgtgatagtgccatggagaaagggttagtgacatattaagcagttgactcttcagttatatccccattaaaaagatgcgcagcaagagtgttacattagcacgctggacattcaaaagcacgtggggtctcctgtttgagcaagtagctagtttaaatagatagaatagtagaactttaaggaagttctgtatggctcctggagggaggcagcttagtataccacacttagaaggtaagggagaatctctgtagagtaaaacactttaaaactcatttacttaccacatccctctattgttaagacagtgatcctgcattggccaactaattagttttgtggtgttaggggtttggcttgtcacatgccaggcaaacaccctgtcactaagctatatcctcagccaccccaactgcccattttgtagatagggtttttctatgtactcctggctagcttggaattcactataaagttgaagcctcaaacttgtgaagattcttcttctctgtctcctgagtgctaggatacaagagtatgccattatagccagcccacgttctgagacagagcctcaccaagttgtccaggttggtttgaacttttgaacttcctgtctcagtctcttaaattactgggattatagccctgtgcccctagactcacacccagctcagatcactttttcttttccttctgttctttatttcttttctttcttttcctcttttcttttcttttcttttcttttcttttctccctccctccctctctctttctctctttcccaggatctggtattttctagggtgttcttaaatttaatatgtagctgagggtgacctttaacttctgatcttcttatctccacttccccagtgctaggattataggcaggcagccaccacacctgactcacatgatgctagaagtcgaactcaaaatttcattcattttaggcaagaagttagtaactgcactaaaatatctctagtacgtagttaacaacttttttttttaagatttatttattattatatgtaagtacactgtagctgttttcagacacaccagaagagggcatcagattccattcattatagatggttgtgagccaccatgtggttgctgggatttgaactcaggaccttcagaagagcagtcagtgctcttaccctctgagccatctcgccagcccccatagttaacttcttacattgtgatttgccacacttcaaggatgtaagcccacaaggagaaggacttgggaccatgttcacttatcttccaagcaatgatagggcttggtaaggtcagactaagtatatcattaaatgaataaatgtgtgaattttttcatctgtacatattttcttctttactagaagaaaaattttataggacatttggataaaagaaaattattttctaaaaaataattttaaaaatatatttgacacacctactagagagtcttctcagtcaaggaccagttagggaaacaaacctgtagtcagggaactgggttcagctaagtggctgctgagatcccaggcatttgtggtatccaggagctactgtgtggctaaggaaacgagaaagtgccagaagcgatcgtaccatgtggcatgatcctgagcatggaaagaggaattgttggtggcagttggaacctaggccaaataagagaactcaacttcttcccctctttttccttttgtccttactaggacttctcattgagggaaattatgcagaaacccttagacaggaaaggctgggaaatgtagttggttccctgtgatagagtagaataagggtgggatccaagcactgacagacacaagggcactgaaaacatcttcaagttgtgatcattcccccacagcttttagggataagggctacccaggtaaatgtgggtaagagataggaacccaccaggagctgtgggtttgtttatcattttgttactcagaaaataagtttccatttttccagttctcagaagcctagggtctaaggcatatttattgccccaattctcacctgggtgactagtcagtgatacaaagatgcacaaagagttttgtggcagtcttaaaacatggcacagcttaatctctccttgatagtcaggcgtttgcagtggggttaattttttccttatgctgtgtgcctctttatctcggcttgtcagtgagtgtttggaggctggtgtctggtgtctcccaagaacttgggttaggttagtcagtactaggtgaaaaaggctctttgtgagtttgaggccagcctggtctacagagcaagttccaggacagccagggctacacagggaaaccctgtctaggaaaaaaaaaaagtgacatcactaagctaaatctatttccttctgtattaaacctgaaaagtatatagtcttgcgaggcacgtcactgctccatataaaggcaaagcttgccaagttatggctgctaattctcttcctgactataagagcatttgcgtaggcaatcctggttcagcactttctacaagtgctttttctgtgaatcaggtcacctgcatttgggctttgatcacgttaatggctttggtggaactaggccagcaaaaggtttcggtgcagtgtgagtatgtttggtttggggctgttactttccacagattaagggaatgtcattgtcaactatgagaatcacccaagtttcatttctgttttacttttattgatttctttttgacaggcgttcttgtagttcacagacacaattaaatgccatttgggttctatttatttacttttgagaccatggtcttgcgatgctaactctgaccgtcctgaactcactgagtaacccaggctggcctttaacttggggagtcctcttcccaaagacacctaagtgctaggatcacctgagtgatcctatgcctggcttaggttttatattttaaataataagtaagtaaataattttgatgaggctgagacggagcctcacataggtcaggctggtctcagattccctacatagctgaggataccttgacctcctgaccgtgctgtaaccacctctggagtaccggtgctacaggcatgcactgctgcagctagctgtgaagtgtttccccagaataccagttctttttagccagactactagtctttaaaggtacatctaaaaggcacatctgtgccgttgtaaagcttcatgttttatagtgataattatttcttactgtttgactcttctctttctcaactttctccttccctaccccactttttctgaatcctgtatttccccacaggctttatggatgctggtccactgatggctgaacggcaggtcctttcccagtggaaagccctagagatgagccaaattcacgtgtggccatccagcaatgtaaggttgctgtgggggttgtattcagttgtcaactctccaccttccccacactcctgcttgtgtggctgtaacctgccctggaatcccacttccccaacgtgtggcttgtggaggaataggattttcttttgttccttcttttcattgacagtgaacatagacgttgggcagtttttgcatctcaggttagttttaggtgcatagagaatacagttttgaaacatactaggttttacaagtccatgcataaagattttgttctgtccttccttccttccttccttccttccttccttccttccttccttcctctctctgtctctccctttcttcctttgtctctctctttctttcttttacatccactcagcttttacaggaaatgtattagtcctaaactggatctttgtggcttcctgtcattgtttttctctcccccacctaaatgaatgggtatggtcccattttgtggtgtatagaggatagtaaaggactcaggagggaggaatactgctctgcctgagtataattgtgtcccagcatagtgactgtagtgagtaaagtatctttcttttcctttctttcttcagagacctgtttctcttagtgtgctttctattgccgtgataaacaacaaatcaaaagcaacttgaacggaaaaggtgaatctggcttacatgttgcacggcccatccctgaggaagttggcaggagcagtggcagggcatgaggaaggctgcttactgacttgcttccaggctcacagtcagtcaattacctttcttatatggccctggagcacctgcccagaggtggcactgcccaccgtgggctagaccttggaacatcaatccacaatcaagaaaatacctcaatagacaggcccacagaccagtctgctgaggcatttcctcagttgagttccttcctgccacaattctagtttgtgtcaagttgacaaaacccagctagcacgctatcttttgcagcagttgttatggaaggcttgactgtaaatccccagcctctctccaaagtctatagctggggattcatgtgcttcaccttgtttgccccaagcgcacacaacttgatgttgtttttaacttcttcctcttttcttatctgactggaagtccccgaatgtgtagatttagaaattagttctcttgtatttttggttttgacttgaaagaatttgctttaatatccctttgacggttgtttcagttcttatgctgtttctgttttgctttgttgttgttattgttgttgttgttgttgttttgttttttgcttgcttggttgtttgtttgtttgttttgagatagggtttctctatgtagtcttggctattctggaattcactttgtagaccaggttagcttcagacaaagagatttgcctgcctttgcctcctccaagagctaggaataaagatatgtgtcaccatgcctggcacatcttaagttttgaaaaatcatttcttatagaactttctatgtagagtgtgaggtcttagtctgcagtctacagcctccgggtctttctattgctgttgatattttagttcatgtgctaactgacacagcctttaaagacgagctagcaaggacccttgtccttgtcaggttacaaactgcagagctgttggaaaggaattatagtgtcagagcagacttgagcaaataaactttcaacccatgttgaggagcctgactgaatctttttaattctttttatcaagtctgcttgattnnnnnnnnnnnnnnnnnnnnnnnnnnnnnnnnnnnnnnnnnnnnnnnnnnnnnnnnnnnnnnnnnnnnnnnnnnnnnnnnnnnnnnnnnnnnnnnnnnnnnnnnnnnnnnnnnnnnnnnnnnnnnnnnnnnnnnnnnnnnnnnnnnnnnnnnnnnnnnnnnnnnnnnnnnnnnnnnnnnnnnnnnnnnnnnnnnnnnnnnnnnnnnnnnnnnnnnnnnnnnnnnnnnnnnnnnnnnnnnnnnnnnnnnnnnnnnnnnnnnnnnnnnnnnnnnnnnnnnnnnnnnnnnnnnnnnnnnnnnnnnnnnnnnnnnnnnnnnnnnnnnnnnnnnnnnnnnnnnnnnnnnnnnnnnnnnnnnnnnnnnnnnnnnnnnnnnnnnnnnnnnnnnnnnnnnnnnnnnnnnnnnnnnnnnnnnnnnnnnnnnnnnnnnnnnnnnnnnnnnnnnnnnnnnnnnnnnnnnnnnnnnnnnnnnnnnnnnnnnnnntgagatttatggagtggggaggtggcttattttcccgagcattagaagctgtcgcctttaaaagcagagctaagagccgccattttttctgactatagcacttactcatattcataataaaataattggaaagtataaaaaaccagaatcatgcaaatgaaagctcctaaaattctcactcttgattatttatttgagtttgtacttcatcaatttttatgacattattatttcatttaacatttatcataggtattctgatgacattaaaaacatgtaaaaatatttatttatttgctcatttctttatttatctatttataaaagcttcctccatcatgggagcatgccgtcatttatgtaacagtaaatgttgggcatttgtgttttcagttttcatcattatcagtaatactgcaatgtaaatttctgtgctactactggactgataagttatttatgctttagtctaagtaattatgggtccctctaatttaaagaagttgggtggcatctcctgggttggaaccacttggagatgattttgctgtaggggctgccattctgaaagcttcactgccgttagacatctgttgaggcaaggcgtagagatctgggaagtcctggcggcacagggcagctttatgtgtcacatcacagcgggatgggtcagcacaccataccctgcctattgagaaagtgttgtcacaccatgattagccccttaggtattcacacacacttccttcactcaaacccatccactggcaaggcgggttagagtccctactgtgctaaaaaaggagtaatgattgctacaattttttggtttttaagcaaggcttttcttagattgtaaacaaagacaatggactatgtctcttgtgtgcacagctgatgtacactggctggcagtgtctctgtgcctaccacagatggtgcttttctgctgctgtgtgttcagatcttattcttctgatttgtaacagtccccttcacactattcactcggctgcttggagacctgtgacattctaggaagctgagaggtgaatctcgtggctgctttgtggtaattgcttctttgcagcatttcatttgtgtgcttctggcatctgcaccacatgaaagctggaggctgtcacgaagctgatcccttgccctctgtaggaggtttcagtgtgacacatcatctgggggaaagtgtagccagggggtgaaactggaggctgaaatagcagtgctttagcccttttgtggatgggagtaaatatttagacactgttctggtggaattaatagtatccttcagcagtcctagaagctctctttgtgcccactgaaacaggtttgcttaattgaagaaccttgccttgactccttggaagctgtgattagtttcttaagagtcctatcctcgtctctggatacagatctgtctctgttgggctggcatctttgccctaccccatgccaaatctttccatatgtaaatcttatacttgcttctgatgttcccagctttgaaatgccatgatgggtcttctgtgtgaaagggcaaaccttttgatcccttcccttttaggcagggctgttttagtgactaacattcagcatgccactgggctagccatttgtgctttcatctcagaattaatttctatgctgctgtttgtttagaaattaaagctgtctaacttgtttagatatggatgtgatttggacaaatgacattgttttttctttgtgtttgccattggttggatctactctgctgtgtggggaaagctgctccttttggaccacaaagttcatctgttggctcagaaggtttggtatagagctgctgcctgggggaaagcctgtgctttgctgggaccaagtgagaaacctcttgcctggctgcgtggtcctgagatccagggcacttgtccttctagatttccttttgaggaagtggaggagagtggatggaaagatatgattatgtcttcactcttagtctcagatgctacatttcctagctgcacaaagaatgaggtattgctttagtaactattattgagcacctcccattttagggataagtaaaaacaatctaattccagttcaactgatgattatttctttaatgaacttgaactctcggaggctcagtttctctatctgtgcttgaactagagagtctgtaaggttctttccaattttagagttgtacatttgtattagtcagccctctgtcactatatcaagaaattctggcagttatcttacaaagagaaaaggtttggggggagcagttgctattaacaggactgtctgtttttgcaaaggtcccaggttcagttcttagaatccaaatgatagcttacacccaacaaccctaactccagttccagggggtctgatgccctcttctggccttcacgggcaccaggctgtgcatatgttgcacatgcatgcctgcaggcaaaacccacatacacatacataaattaatctaatttttttttttaagaagaaaggtttgttttggttcatagttctggagggtccatccgtgacaaagacagtgtacatcatgactgcagcatgtggtttggcaaaaccaggaaacaatgaagaggatgagactagtgtctcacaacatcctctgatggcagacaccagagatttgaagacttctcatgaagccccacttctcatatgctaccccatctcccgatgaagtgctactcggggaccaagcttttgacacataggccatcaagctataacttgactctaagtgcctatctatcacaggacaagagaaaattttctgcagaattggcatattttgctatcttgcctgtttcgatctaaaggcttaagattgattgctctagagcagtatttcttgaccccagcactattgacattttggtaattccttgtggggattgccctgtgtattttgggcatttatcagcactccttggcctctagatgcctagcacatttccacctccttcctgtcagttgtgacggccaataatttccagagacatcagggttctcccttaaaggagaaagcactttggttgggaactctaggtccagagggacaagggttggaccctttcctttggatgtgggtgggctttactgtcagtttttatgttgttcttctatggcttttcacttgttttatcagcaggtttatattcagtgcttctctgtgcaggaaatgctagcacttgattatgagggacttagatgataataccaagttttgaaatatcaggtgcagctggctggctttgaagtggctatatagctattagctcagctgtccgtgcctactcatcttacctcaggctgctgttagtgactggctgaggtactgactgacatgtaggaaagcagttctgtgcagagactatcaagtcagcaatgtgaatcatgggtcaggactgggtcttgtgtgaaaattcagtgctatgtatggcagttagcccttcagctgcccatgaagaagtttaacttctcgtccttgtgtagagggagaggaatcgatcctacggatagagaataaaaagcccctcattggtttccatgtcatctttttctagtgtccccctcccagtgggcattctctctctggatttttcagggttttttccccttacttttcaagattataatgacatttcttccttcccttcaaacttcccctataaccctccctgctccctttcaaattcatggcctctttttttcattgtcattacatatatgtgtatgtgttctcatcctccctctctcctaaatacaacttgcttagtttatataatgttgcttatatgtatattttcaggactggtctgtctatctatctatctatctatctatctatctatctatctatctctctctctatctgagacagggtttctctgtaacctggctgtcctgaaacttaccccgtagaccaagctagccttgaactcagaggttcacctgcctctgcctcccaagtactgggattgaaagcatgcaccttcaccactggctaggttaaacttttctacctgtgcacttttgctataaaatagaagttttggaataactttgaattttctcccactgactctctttaaatttacttttcactgggtcagatacagaatggtgcatagtaaagtaggctgtgtttttgggcatccttgcagggatgtgctgggatcccggcaccatgactctgacacgagcctgtgttatgtgttagtccctgccctgggcttctagcaggctttgcttctagtccagctgagcctttgctggagtaattgcccacatgttgtcttcaagccaaacaatcgtttgtattgaggtagtactgaggtagtcttgctgtttggcacttcatgaaataacctccttcctgctcccagtgaaagcagctattttttattttccccttcccctttgcagagaagcacgtctcagccaccactcttctagcttattcataaatgctttaatcaggatctttgtacagagggaattagctaaagtcaaactatcaagggctagccaggggacacaaaacattatagacatctactactctgacattctatggggcttgtttaattgtaccattcctctataaaagtcattttcgcaaaaatattcctactagttttcatttatttagatattttttactattttatatcatttttaaaaaatatttttaaggtgacagcctatagacagaattctcaaaagaactcttaaaaattgttgggctggtgagatggctcagtgggtaagagcacccgactgctcttccgaaggtccagagttcaaatcccagcaaccacatggtggctcacaaccatccctaatgaaatctgatgccctcttctggagtgtctgaagacagctacagtgtacttacatataatcaataaataaatctttaaaaaaaaaaaaaaaaaaaaaaaaaattgttataaggatgctgaagtgtagctctccacagttgatggctttggtggggtgcaggtggggaaggactcagttttctctaaggggctggcatgggagtttgaccatgttccagtgagtatatgggtaacacaagttggaattttttttcttattattgttcttttttggggacaggagtcacaaaagttgaggagcagatttgagaggacttggaannnnnnnnnnnnnnnnnnnnttgtaccattcctctataaaagtcattttcgcaaaaatattcctactagttttcatttatttagatattttttactattttatatcatttttaaaaaatatttttaaggtgacagtctatagacagaattctcaaaagaactcttaaaaattgttataaggatgctgaagtgtagctctccacaattgatggctttggtggggtgcaggtggggaaggactcagttttctctaaggggctggcatgggagtttgaccatgttccagtgagtatatgggtaacacaagttggaattttttttcttattattgttcttttttggggacaggagtcacaaaagttgaggagcagatttgagaggacttggaaatgagtatgttctgcattcatgatgtgaaatcccaaaataataaaaaaatattatttaaaaaatacatttttaaatgtctatgagtattttgcctgcatgtttctaagtgtactgcatgcatacctggtacccacagagaccagaagaaagtgctgaatccctcagatctgagcccaggtcttctgcaagtgttcttaacacttagccatctctccagccctgttctgtgagctttttttttcctcccttcttcaaggtttcatgtagcccaatctgacctcaaattcttgatcctcctgtttctaccccacaaatgctagaattacagtcatctgctgccttatctggcttatgttttatttatttattttctgtgtaagattgtgggagggggagggagagattgagaaggcacacacatatcgatgtgtacaagccatggcatacttctgtaagtcagaggtcgacctcagcagttggtccttgcctttcaccttgtttgaggaagtgcatctttgtttaccttgcatacaccaaactaaccaggatgtgagctttcaggaattctcctgtctccacctcccatcttgctgtaggaatagtgggattaccgatgtgctactacgtcccactttacataggttctggagattcgaactcatgtcatcatcacgcccacacagcaaatatttaactctcagtctagctattttcctagccccagcttaagtttttgttttgttggttttttgagacagggtttctctgtgtagccttggctgtcctggaactcagctctgtggatcagactggtctctaactcacagagatccacctgtctctgcttcctaagtactgaaattaaaggcgtctgccaccccacccagctgacggcttaggtttttaagagttatctaaatagacagttttgtaacctaaaggaccagacagccagactgatagacagacagatagatttaaaaacaaagacaaaaacaaaaaaacaacgttggaacagctgtagatgagtgcccaggagaggctgagagagtaacatcagaaagaaggcttctgtggaaagcaacctagagcatgggcttcacacatggctttcccattagagagaatggcttcctaaaggcttctgggagaaaattttcagccaatccagaaagggcaagaagttctgaaagcctttccgtgtccgcatcagagtgtgtctggattgacttcagtccaggtgcttttcctcctgattcaccctttttctagtcacaaatttccagcattcacttagtcaactccaagaacagtaggtatactttacctcccagaacacattcggtcaaggcctgtttccttttttatttacagcctagttgatcctgtgctggggattcttttccacttgnnnnnnnnnnnnnnnnnnnnnnnnnnnnnnnnnnnnnnnnnnnnnnnnnnnnnnnnnnnnnnnnnnnnnnnnnnnnnnnnnnnnnnnnnnnnnnnnnnnnnnnnnnnnnnnnnnnnnnnnnnnnnnctattctatctggcttggaccgagcctggccttgaacatgttatgatcctttttgctgtgtgcctcttttaaaagaaagtgtgcttaagtgaaagaggttggcctgtttaaagtatactgatttttgttttccctcttttgcctttttttagacaaggtcttgttgtttggtgtccaacctgacccaaagctcacagtccttctgcctcagccccttcagaagtgagatttcaaaaatggaaatacatgtctagccttttcattcaattttactatgatggctggacttgtggtgcccacctttgatcacagcactggagaggcaaaagcagaaagatctctgtgagctccaggacagccagtactacacagaacctgtctcaaaacaacaaaagcaaaaatccaatttgaccgcactcagtggtttctaagcttagagggctgtgtgtctactggaagcatcttcagggtctccttggttagacaacccatccagtatcattgagttcacacgatttttcaacacaggcagggaatcttttggccaactttttgttctttccttaaaatatgtcttctctttatttaaaaaagaaaatcatagcagcacataccagaatttccctaggaaatgccaagagacttggccccatcccaaggttttagatatcaccaccatagccatgcacagctacccagctagaaagactgttttttcctttgttgctgggggttaagcccaaggcctcttgcattttttttttttaattaaggcattactgacatgaaaattgcatacacatatatgagttaaaacatggtgtttccatgtgaatagctatagatttttgtggcagataaaaagctcttgtggaatcagtaactcaccacatccaggcacttctgtctgatgcgttctgtcacagagtcagaagacaccttaggtgtctgtgagtaggaattacactctcaggctcctctgggtcacaggagcatgactgctgtcacaatcttaggagaaagtgatgccactgttggaatatagaaacaagaagagagggtaatgagcattggttctagaaagacctagaccatggaagaatttatgccatacttagttgacagtggggttccaggtatatggtctctggatagaatgaccaccagaacattccttgtaggatatctttttcagaccaacaaaaatatgaactaggaccttgccctttccttcgtgaagtctgaagactacatttcagtaaaaatggtactgactggttagttccacagttagttatcaccagaagcatcagtaggtatatatactaattactattccatacaacctaacctacttacctaatcctactttcctagcaataataagccagggaaataagggtgatttggagctaacttattgaaaaataagcactttatttatttatttatttatttatttttgagataggctttcactgtgtagccctgcctgccctggaattctttctgtagactaagctagcttcaaactcacaaagcttctcctgccctgcctttcaaatgctggggattaaaggtgtgcaccaccactgcctgggttagaactttaatgtttcttggtgttgcattttgggattttattgggtgtatatgctagagattcatctcaggacatcaaacattctaggcaagcactcaaccagtgtttcctctcccttaaaatttattattactattatattttttttactttaagacactgtcaaactaacctactcagataggccttgactttgtaatctttccatctcagtgactgggattacaggattgcaagtagctggtattttaggaccacaccaccagacctagcagcttaatgaattagaggcattataactatctttcacaagagctagattttagagataatctaatctaggcaaggaaattgactctcaaagaattgaactgacttaaagtcaggtagcatagttcagataacacttatctttagctctgtggattgcaagaatcgggcagatgaacccagatatgtacaaacatgttactggctagtttagagcaagtatgaggtttcctagggttagcagaaaattcttgctgatacttcctggaacgttggctattagattgctttggacttgtattcctttctgaaatccttgtatgtttttcagtggtattttcttttgtggccctccctggcctagagctgaggaaagccaagggagcgtcacagtttgtaagcaaggctaccacttttgagaaagactaagaatccttcttttcttctccaagacctcagttgattgcttgatgttaagaggtttcgggtgttttgagaaaagccctgtcggctgctgaaatagatataggtctacattggctatcatttcgtcagtgagtgctcagtggtgttctgtttcattaacctgcttttcctagttacctgggagatgtgaggttgctttgcacctccactgaagtcacagcactcaactgctgcatctgttcccaatgactgatcaccttgattaagttgactcagctggcttgtattttggtcaaatataagaaatggagctctcctctgctagaatcgctagcctctaccattgtcttgcatatttcatgtaaaactaagaggagtgaagagcaagctctgggagatggaagtggtccaggtagatgaatggaacccacccagagcaagccctctctctgtaagagtctgtgccgtctaacaatagaaccagctatcttttgagatggtccctaatttacttgtcacttcagagccaggtgatcacctgaagcagtggttcacaatcttcctaaagctgaggccctttaatacaggtcctcatgctgtagcgacccccccaccccaccccaaattacattgctactgtaattttgctactgttatatattgtaatgtaaatactgatggtatgcaggatatatgctatgaaagggtcatgaaacctctgtgaaagagggacacaaagggggactgacaagttgaaaactactgacctgaagggtcccctatatccagtggaatggctgggcttagtgaaatccaagattctttgtaattctgaacctttttttcttttaatgatttattattttttactatacatatgcatgtatgcatgtatgagggtatcatgcatgctttcatgtatacatgtatgagggtgtcaattcccccggagctggagttaagagacaattgtgagctgccatgtaggcattgggactttatcctgtgtcctctggaagaacaaccagtgctcttaactgctgagccatctctgcagccctgtacctctgactttttacttcttagagtagaatctccctcatccctaaagtgacctgagaaatgtttccgttttctttgtcttagacatttaagaagtttcacttctactcttttcttgactttgtgcatgtggatcatgtgcctctctgacagacagaaacattcttgcaagcagagggaacagggcttctcttgtagaacattctgagagcagagcttgattgagcaagccctatttcagtctcatggttccttaaactgacatttacagaagttactgcttactgtttattttggaatagggaattggatggatacttttttgaataaataaaagcaggctgggaaatatgcctcttgtatttaatttcccacatcaacgattaatcaggaaaatgtctcataaacttacttacaggtcagtcttattggggcattttctcaattaagatgctctcttcccagatatgtctagatttgtgtcaaggtgacgaaacccaaccaggtcattatcacatttaaattagttttcagtgctagttccaggctcatgaactgaatttgactgttttagttccattaataattaatatgtctataatttgataattttgcttggcatttataatcttgttcacacacacattcacaatgtacatgcatgtgcatacaagccatggcacacatatcaagatagaagacaactagaagaagttagctctccttccactatgtgggtttctcatcagacttagcaacaagtgcctttacctgctgagccattttacagccacatctggcatttttaaaagccattgaatgatagtcaagaagcatgaagttaatcttctcagtctgaatggagtagctagggtattagtaaagcttagagaagattaactaaagaagggagacgctgcatgtgtgtagcactgtcccagaggctgtgggcccagatagaatggaggctgtctagtgcaagcattccctctatccttcctaaccattgtggtgaagtgtgctgttttcttttcaccatggtggctaaaatctgaacctgtgagtcagaataaatcattcctccctaaattgttacgttcttgacaaacaatgacaatgtcatagtgacaagaaagggactaacataggaaaggagcccctcacctccacccctccccaaattcacctacagtgcggggagggtagctcagtggtagagccctggcctagcgtgtgtgaggctcaagctgcagttctcatcacaggaaaagagatcacctccaaattatctgctagagttttaacagtggacaggatggaagcttcactgttcgcctgttcactgactttaccacacaggctcattctctgccattcccgagagctgatcctagcctctgcccctggtgggacttaaccgtttctgaatacgctgcatttgttttcatacaacttgattgttagaaagttctttccagagcgtgctacaaccaccatctcctcacgggtgcagttctctggcgcctcatcagagttagcccatccctctcctgtgactgctctgcatgttgaaactactgtgtccttttactgataggctgagttaaaagaaaacatttgatcccacttctcagagctatttagtgtgtactttggatacttttcctggatagcaatattagaatagattcttacacggttttaatactgaattttaaaattcaatgtatcatagaagtagttctcatctttattttttttctttcctttttgttttttgagtaaggtcaaatgtagctctgatcttgaactaagtagaccaggctggccttgaacttccagaaatccactgcctcaacactgggattagaagtgtgcactaccacactcaacagaacagaactatttctgtatcaagcagagagctaaacatttgataattcctttatgtagtctaccaatatagtttgtagtttttagaaagcaacactaagtcaggtaaagtgactcatagtgtcagtacctgaggggccgacacagcagtgccctgtgaggtctcggccagttgggctaaagtttgagaccctagttttttgttttgttttgttttgttttttaatcctaaataaagaaatagaaaatgtaataataaacttttttgaggagtgggggagggagactggtctcactatgtaacccaggctagccctgaattcaggtactgggatacaggtatgtgccagcatgcctaacagtaatgaacagtttaacaattgtatcctacctgcttttcccttgatacatttatttattttagaatattttagaatatgagtattctatctgcatgtataccagcataccagaagaggacatcaggtcacattacattacacatggttgtgagccaccatgtggatgctgggaattgaactcaggacctctggaagagcagccagtgaccttaaccactgagctatctcttcagccctggatttatttacctttaaatgtgctttaaaaaaaattctgcttctatactatgtgcagggagctatgctatgccctaaggatgacagtgagtgacttcaactcttgtgacacttatagtttggcaggaagaaatgtggaacaatcacaatcataagtacataacaacaagcacagtataagttagaaaacacaaaggatcaagctcatagcacttaaaaaaaaaaagcccaaaacactactgttttaaagatgtaggctgagatatgctcaggtagaaaggtgttggggtttatatacttctttcagttgatctatttgatatgaggtttgtggatggagatgtgggctggaatcgctgaagctggtggttaataatgctctgcttttgtgtagttgacatttcctaaaataagatgtaagatgaaaaggaagagacaggaggactatgaactagtgcagatttataaccaaggaacccgggcctcccagctctgaggcagacactgctgctgagctgtacccagcacaacaggcagaaaacatgttatgtgaaacagtgtgatatgtgaacagtggtgactggtggtcagggaaagcctttgggctttggcaacagcaggtacaaagccttcagacaggacagactggtgccttgagggcatgagagaaagctgggttgagtctagccatgggaagatacacaggaccttggaggataggtagttggtacacacctctaatctcaggactcaagaagccaaggcaagaggcttgtgttacacagcaagtaccagtccaccaagggctatataacaagatctgtctcaaaaataacaaaacaataaaagagtaataataaattaaaaggcccttggagacatgtacaacacatatgcgtgacattcacaccagtttacatttttacctcaatgtaggaaactccatggaagacgatagtcagaagtctgacctgtacagacttggattttagagattattctgggggccgatttgttattggtctggtagtgtagcttagagatagaatacttgtccagtctgtctggggtgctaggttcaatgcccaggactgatagaagctctgcctttgtatccttagtacctaggcctacctaggtagtccataatattgctaggagaatgagtgcttgcaggtgagagatgagacggtctaggtagacgtagcttctggagcagagggtagttcatttgatggagtgcttgcctagcagtcacagaggcctgggtgtggtgcataccaccacataaaacctagggtggtagtatacacatgtgataccagcacttgggaagcatcgttaactacacagtgaatttaaagctgtttggggtgacaaagacaccctgtctttaaaaaacagagggggactggagagatgacttagtggttaggagcacttactgcttttgtagaggactgaggtttagttcccagcacccacatggtagattacaaccatccctaagatgggtcccagggaaaagggcaccctcttctggccttcacaggtaccaggcacacatacagtatccctaaatacatgtaggcaaaacgctcatacacataaaatgaaaataaataaatctttttgtttgtttgtttgtttgcttgtttgtttgaagacagggtttctctgtgtagccctggctgtcctggaactcactctgtagactaggctggcctcaaactcagaaatccacctgcctctgcctcccaagtgctgggattaaaggcgtgcgccaccaccgcccggctaaataaatctttttttaaagaaaggaaatggatagattcaggaagtttctgggtacaccgaatagggctagacagaaaatgaagagattcttgcttcgcacgtccctgttaaccctggtagctctggtgggcatggggtcagtgacaagctgcagtggctgcagcaggtattcagggtttagtgctgtccagagtggagtacaagctggacattgcttgcatgctttccaccagctctcaggcatcagagtgtgtgtgtgcagtgtgtataagcccagatttttccttactaggtggatatattttacacttgattttttaaaattgatcaaccaaatctacctgctttctttgttttcatgagttcttcatcgcagaacgactcctgtcagtgtgaagtaggcagtacctccagaacctgtgctgtagctcctgtggcgtgtgctccgcagactccttttgcgtccagaaccgttgagaacattactttgcatcacctctttccaggcttagtttcaggatgatgtctctgggagagttgcaggatcaccaggtgtaagcagatgctgcaaggccttgcagcagtgatgtcaagcactgtggaatctgagcatcccccatccaagctggcagcttggacatctgtgtatgagtgctggcacatgctggcacaaggacaaggattgcgtgcagaggatcgcagccagggcggttaagttatatgctttggactattttggnnnnnnnnnnnnnnnnnnnnnnnnnnnnnnnnnnnnnnnnnnnnnnnnnnnnnnnnnnnnnnnnnnnnnnnnnnnnnnnnnnnnnnnnnnnnnnnnnnnnnnnnnnnnnnnnnnnnnnnnnnnnnnnnnnnnnnnnnnnnnnnnnnnnnnnnnnnnnnnnnnnnnnnnnnnnnnnnnnnnnnnnnnnnnnnnnnnnnnnnnnnnnnnnnnnnnnnnnnnnnnnnnnnnnnnnnnnnnnnnnnnnnnnnnnnnnnnnnnnnnnnnnnnnnnnnnnnnnnnncacccccaacatcctgaagtattggacagcgttggggcgacatgcgtgagtctgtttactggtcccttcggtggagattgatgggaagtgtgtcctggaatcctcctgtatcgtgttcttatgtgcaggcgctacttattgttgttctctctgtttaggcaatttgacgtaggtgttataaaacacattttatagatggagaaactgaagcctgggaagtacaagtctctcaaggtcatattggtaatcactgatggagccgcagtcttttctgacttcacagactatacttttaataactataccatttccccacattttcagccatataaactaggggaacgtgttgaagcttgaggcccaaagtctagcgtattaggcaagggctttactactgagctccactcctagcccataagtaactttttttttcttccttggtttcacggactcttatgggttgtgtagttggtgactgttataagtctagttgctcaaaactgaaagagaactcaggttgaagggctgtggttgagctttagcctggaatgcatgaggtcattggtttagactcaggttcagggaggtcaggtgagggagagagaccgagtaaggtagaaatgagaagtgtcaccatctcactggcgaagtgtgggagggatgctgggagggaagactgtgggggtgggagaggaagggaggctgtcacctggctgcttatgaaaaggtagttgcctgtatttctactctggggtctttgcaagtgtgtagactcagggcaggaagacttttaagactgtaagtgtctggagatcccacagtgatgctggtatcttaggtgactgtagactgctttctcttgacttagacccagaatgtagatagcctaatcttccatagctaacttctttccaaaaattttattaagtttgtttgcttgcttatttatatttattcattgtgtgtgtgttgtgttgtttgtgtggtggggtcctattgcatgtgtggagaccagaggacagcttgtgagaattcattctgtccttctgtgtagattctaggattgtattcaggtcaccagcctcggtggcaagtgccatgacctgtggagctatctcactggcctcatcttagctatctcgatttcaagactctcgaatctagaacacagaaaaaatgccaaagaagtatgaaataattgatatttatttggttgatcccattaaaaaatgtaaagatcatagggtagaaacaaaaccagaaattcacaccatgagaaacctccttcacgttggtttggctctttccttttgcagctgtatgacaccccactaccaggaacaagtatgtgaggcgttgtgtgtctcggagtctgtgggagactgcgcagtcagctagggactagagagattgaagatctttcagaagataaaaacctgaaccagtgaaaatagcaataaacttccaagcagagagcaccccctggtggtgacgaggaagacttgcacctcctgtcattctgtattttgccataatggactttacctgaatcaaaatagtctctttctaataataattatggattcagatttctaagagttcccacgagactctagcatttgtttatcaatactgctgtcaaatatctcaggctgggcaactttcttattccaagcacaggcctgctaatctctgtagaaagccagcagcattggcatcacttcaacctctaattgtgatactgtgctgaatccatgtcattagtttctgaggaacggtggagaaggaaccatgtcagatttttcagtcagtcttggtaactgtcatataagtctttttccccccatataaaattatgagaaacagtttggagattttgcggaggtattattagggtaaagagaactgtcaggggataggagattctatacctttttttaaactcatgtgtgagatttctctttgtactaataagctttcaggtaactacattatctggcaattctgaatctagataattctgtagttgggtaaagtagggacatcagcccggcttagggatcttgttaggttaatgtggatgcatattttataggctggaggaaggagaggataccagcgttttcagtttcagcatgagcctggctggcctgcaatgcatgtatcctttttcctaggaagaaagctgaatccaggcccctcacctttacagcatcttccactgttggtgtaaggtgccaggttagagagacttagatgtggctttccaccactctcctgggagttttcttcatacaagtgacaaagtactatgacatgtattttagcactgattagacactaaaagcatgtcttgtgccttcacgttacatagttccatgtatattagatgtctgaaactggcaagtcctaggcagaaagtagacctgtgattgccagggactgggcgctaagggccggtggggagcagggatacagagtacctactagtaggtttgggatttgagtgataaaacttctggatttagagtggtgatcaccatgcagcggtgtgactgccctgggaacctctgtactgtatactcagagtttaagctgaaagtcaaataaatgttgatctacaggaatgaataaagtcagtaaaaagggtaattgcagtaaaatctcatttggttttagccaaaatgctgcttgataatactaagtagcacagacgagcattctcataatctgtcctgtctcgctctccacagggccgagatgggcctcctgnnnnnnnnnnnnnnnnnnnngggccgagatgggcctcctggaacatcggggtgttcatctgcattcggtgtgctgggatccacaggaatttgggggtgcatatatccagggtaaaatcagtgaacctcgaccagtggactcaagaacagattcaggtaccagcacagcctttagccagcttctcttgtacccatgtaagagcagtttcaggttgaatgctaaattgatcatgaaggtgaagaaaaaggagaaggaaaacttaatagttgtcaaacacgtttgtcaaattctaatttttattgtatttatttacttatttgggacagggtctcactgggtggcctggaactcatagagatctccttgctttaccctctgagagctagaattaagagcatgtgccactgtacccagcaaaattttatttttcttgttgttttgtgacaagcaagcctctaactctttctgtacttaccttagcctcccaagaactgagattataggtgtgtttttctattagtaaaattattattcttttaagatggtgggacctttggcagttaccgatacaacacttgtagttttagatgtatgtaggcagccatttaaaacacaaaaccacaaaaaacactttctgagctaagggtatagcccagtgagggagcgttcacctaacctgtaggaagcttgctggttttgatccccagtattaaaaagaacaaaccaactttcaaaccatagactactcattttcttccttgtttagagattgagcgagggcctcacatacactaggcagaaactctaagctgtgcccctgagctatgattccagctttagcataatgttatgttgctaaaatgcatgtgtaaatctagcttcctgtcagcttggtggcctggtggtgatacataaactgatgctacccaagagccttttagtgtaactaattgttctttattttctttcctatgttgaaacccttttttgaagggtttttttcctccctttttttggtgtgtgtgtatgggagagggggaggggtattaaggaaggaggatataaagaaaaccacttgctaaagttaatggtgggaataggaggttttgtttcatttgtgttggaagaggtcttattgtgttagaaatgatctcagactgtacttacagaccattatagctctaaaatggtgagtgacatatttttttcctagtttcatttctattgctgtgataaaataccttgaccaaaagcaacacaaatgaggaaggctctaggttacaataggttactattctgggtgagtccaggcaggaatctgagtagtttgtcccatcacacaacatgcagaggagggagaagcaaatccatgctgctctctgctggctttcgcctatcttagtgctgttcagagacttctgcctagggaatggtactgcccacaacgggctgggtcttcctacatcaattaacaatcaggacccttctccacagtcatgcccacaggtcagtcaggtctacataacgcctcagctgccactcctttcccgggtgattctgcattgtatcaagctgacaactaaaactaacctgcatggaggactatttaaatgctaaatggaaaatacacttattcataacacaactaagtaagttagataaaagtataagtttagaagggctgagggtatagctcagtggtataacagttgtttaccaggtacaaggccccgagttctagtatcagcactgccaaaagaaaaaacttgtattaacttagaatttatactacctgttagtgctggtcttgtagaaatctgatggatagcaatgtagcttgggttttcaaatgaattattcctgaattatttgtgtcttttagacacagctttcaattagaaacaaaaccaaaccaaacctgagggaatcagaggctatcaagtcccagggaattagatgtccttttctggctgcacagacctgtggagaggaaaaagctgtgggggggaccaaatgttgggaaacagaacccacaagtttaagccttgcttgtgtcactctctgaagctgactcttcatctgcacagtgggaggactgggctggatgagggcacctcctggactcacctcctgtctcttcgttgtctttcattgcagtgcatgcaagagatggggaatggaaaagcaaaccgactctatgaagcctaccttcccgagacctttcggcgacctcagatagacccgtatctttttggagtgatagctgagtgcagttttgatgtttgggaagagccaggagaccttcaaggcctgagataagactgtgccatctctgtatgaattagcccaagactttggtttttctctctactgcaaccaaaacaaaaacgtgcttatgtgctgacattgggactagcacctagcatcaagtaggaaaagctagggaattagggctgcagtgactttactgtgagtccttccaaagagtgacagctccaatagtttgaatctctgacactattgtttgacaagaagaatggcttactgtgctctattgaaccctggcaattggcaaaagtggcactgctttgtaaatatcttgtataaaagtattgactttgactggtttatcaatattgctcttcctccattccctcagcccgggctgacagacacagagcaagcccatttgaaggtagtgtttctcaaggaactttgcagactacctttttagggtttgatgttggtgggacctgttatgagaaagagatgtgtcagtcagagtctggcagcagagcctaagtttatttttgagagacttttaggtgcctttgaagtctgttgatcaagggccttaaaacagatcattgatttctttccctgcatcagccacagaggttaatcccacttgctgttgtcattactctaaagggaaaccaggaagtggtgattgcctgcagtaagcttgaaggagtgatttcaaggttttggtcagggaaactgtatatgaagaagcaggcgtcctgtggggggaaaccaggcagaaaggaaaggggagagcattggcatgggggacaaattgatcttttacattcctagtgatggagacacggtttttgattcatccttaataagtgtttgtagagctgttgaaggatttattcgagataaatatgagaagaagaaatatatggaccgaagtctggacatcaatgtccttagggttggttgtaaatctttcaagttttgtttattactaataatttactttttaatcaggccagagaagaatttgaaaggcttccacttaataaacaaaacacaaatggaagtagcaaaatggtcccaaatggccagttaataaatgtgaaagtagcctgtcatggcagtgcacattttaatcacatccaagacaggcaagctctgtgaatttgagaccagcctggtctatatagcaatttcaggccagccaaggttacataaatcaggccctgtcttaaataaataagcaaactaaagtttacaacaaaaaaacaaagaaacaaacacatacatacatacatacatacatacatacatacatacatgtaaaagtaggaaaaagccaggtgttgagtcaagcctatgatgtggaacatgctttgagccttgctcagggacaggctgctcatggacaggcacaacaaccatcagaggatcctttgccttgatctacattgagaagtgctactatttctcagtaccaaattctttcttccctccctcctccttttttgagtttttgggacagggtctaaccatgcctggcctcaaactcctgcctctactttccaagtcctgggaatataggtctctcccacatctgactccacattccttccttaaaaaaaaaactatttagttgtatctgtgtgtctgtgtgtgcacgcaccaacgcacacatacgtgtgcatgaatgtcatgctttacatgtggaagtcagaggataacttactggagtcacatctctccttccaccatgtggattccagaaagtgtgctcagatcaccagccaggttcttacccactgagttatctagctggtcccaaattatttctcaagatggacattttgaatataataggtcaagtagaatgatatcatatgtatgtatatgtatgctttaatatatatgcacatatactttttgtttataaatgatgctaaaaggagcaggtctgtctagttaaatcatcactgtttccttcagtctgaccagcatatccttccactctgatatactgatggcctctcattggactaattgacagtgggacatttcgtttttactgggaagagtttcagaggtatatgagttgcagttgccaagtgtatagctgggacaattacaccacacagtggggaatgcaagataattttagataatgatgacaggaaaagcagcagagatggcgctagccctaatgcacttcgaatccacctgccatccgtcttctagtttttattctactgttactttagtcactttctggtttgccctgtgaggactgaacccaggctcatgcatgctaggcaagcactctaccactgagctatcttccctttaggtgtttattctaatggatgagacaaccagtgaaatcactgtatttgcatggggctccctaagctatttcatgtaaaaagccttcccaggtcaggtggcatgggcctttgatctcagcactcaggaggtagaggcaggcagatcttcataagttcaaggccaaccttgtctacagagcaagttccaggacagctgggcataaggaaactgtgtcccaaaaagccagaaaagccttcccagacaatgaaaagttaagctaactggaaccatctgtagatggatattcggcagggaatgagaaggacgttacctggtgagtctctataggcaaggcagtacatgtattagggaaaaggaattccttgccaacttaatatgaacaactcaccatcgtctggggggaaaaaggcttgtcagttagcataagtgttccgagaaagaattagccccttatacaccccagagagcaccatccaaacgaattttgcaggcctggagaaatagctcagtagtcagtagcatgtgctctgtagaggaggatgagagctcagtccctaacatccacgagacagcacgcggctgcctgtgacagtctctgcttccctgggatccaacacctaagttttagcctttgtaggcacttcgcactcacatgcacaacgtaacccctacacacacacacacacacacacacacacacacacacatcattctaaagtaaaataaatcttttaaaaagagtttagaaccaaagtgcacacgcatttcattttatttgtggaaaagtaaaagctatgttcactgtgctgaagtatatgaagtataagatcaaatgatgtcagagggtatgtagagagacccagaaggtagatatggggaggctgtggcaggaggacactccagcgatggtcttggcattgctgtagcctcacccacaagtgttcaggtgggaaagaaagactgagacttttagtttttttgctatgcttagatgttctttcattcttgttataacaagaattgatagttatttaagtctccagcaccataaataaaaagaatatttttagcagtcaggatggtagcacatacctataataccagcctctggagactgaagcaggagaattgccacaagtttgagatctacatagtgtctgtctctgtctctctctctctgtctctgtctctctctctctctctctctctcttaccttctctcatcctctcttacccctacacacatagaaagaaaaaaaagaaggaaagaacattcattaaataaaaacaactagttgtttcttttttttttaagatttatttattatatgtaagtacactgtacctgtcttcagacacaccagaagggggcatcagatctcattacagatggttgtgagccaccaaatggttgctgggatttgaactcaggacctatcagaagagcagttagtgctcttacccgctgagccatctctccagcccaaagacaactagttttaaacaaaaagtaactggctttgctaaagagatctcgtggttagtgtgcagtgggagagatgtaacttcaaagtgttgtgtacattggtagcgttctgctgaggtattgccccccgcccaaccccatctaaatgtctgcttttcatttttatttgtttgggttttgttttgtttgctttgttgttgatttgagacagagtctcactatatagccctggctagcctgttactatgtagaccaggctaatcccaagctcacagagctcctcctgcctctgctttccgagagctgggattacaggtgcacagtgctcccttcaaaggtcagattttaaaaaaaaaaaaaaaagacaaaactttgtttaacttcagtatgtagtagtggtctgctgggcataatggtgcctgcccatctatcatcctagtggctttgggtataaacgcagaagaatcaggagtttaaggtcaacctcggctactagtaaatttcaggccagccttgactactttcgtctttatttccaaaaacagagacaaaaaggaaatagtgttctgtattccagtgccaattctacacaaaaagacagagtattatgataaagttatttttacaggaaatatgaaaattaagaggaagaacccatgcttgttctcgttgtcccctaatgactcatctgggtgtgtgccttcctcagaggcataaccagaatctagttataaaggatgtctcctcgcaaacatctcacatggtgtacatgctccatctatatttctgtggtcattgttgcatctcctgctgagcagatgaaacagtttctttcccctccattagcaggactgttgtcacttaaggtttttgttagcatttctgggatggacagcttagtggtacatttgactttttactatagagtcttttggaaggcttgagatagggtcttgctaaatatcccagactggtctggaactgactctgtagcccaggttgtccttgaactggagatccactgcctttatatccgagtgttgggattctataccaccaagccctgccagattgtttccatctctctctctctttcttcctttctttcttcctttctttctttctttctttctttctttctctgtctgtctgtctgtctgtctgtctttttcttccttcctttttctctctgtttgtttgtttctttctttcttttttaaatgtatattttcttatttttatgtatatgagtgatctgtcttcacatataccaggagagggaatcagacccaattacagatggttgtgagccaccatgtggttgctggaaattgaactcaggccctctggatgagcagccagtgttcttaacctctgagccatttctccagcctgcctgtgaactttttaagtgcaggcaagtttgtgtcactatgcccagcctctagctttgtttcctaattttaaaaatagaggtgaaaaggctggagacgtggcccagcggttaagaaaaggctggagacgtggcccagtggttaagagcacttgatgcatttacagaggaccagagttcaaaagagcaacaaaaactgagagagattttcttgtatggggattgttgttttgagtatctttgttgtatatcctagactggtctcaaactcaaaattctcctgccacaatgttctaaatgatgagattacaagcatttaccaccttgcctgcctttagtatttatttcttgagacctttttggctgtttatagttatgtataacacataggagataaagggcacaaatgtgtggcaacttttaaacttccatagattgtctgtctgtattacagatttcaaaaagggttgagtccttaaaatgtggggtctgcctcattcagtaaggaggctaatgaggaagatcagtactcacaccccacaccaaattggttgcatttctgcatcagaatctttagtgaactttgatgccctgcctgcatttggattgtagctctgaaacactaattgtgctaaggctaagctatcattgtcctgttacatcactttagaaagagaaggatgataagtggaaacgagggaatgaacccgctccggagaaaaagatggaacctgttgtttttgagaaagtaaaaatggtaagtggggagcttctcaccatgtgggtggtcccatgtccacacacgaacctgcaggaggagagtggcgggcgggaggctcagcggtgcgcgggtttgaaaccatactgcactgttgcactgggactaaaggcccatagagcacctgctgcttgcccattgccagttgctgtctaatgtgctctatagcttttcttgctctcttattatctagcaccccctgctcccttctctttccctccctaccccatctctcctctcttctccttctatcctttttttaaaaaatttcttccttccttcctttctttctttctttctttctttctttctttctttctttctttctttctttctttccttccttccttccttccttccttccttccttccttctttccttctctctctctctctctctctctctctctctctctctctttctttctttctttctttctttctttcttcctctttttttataatgagagaggatttcactatgtagccctggaactcattctataggtcatgctagccttgagctcgcagagaccttcccacatactgaggttaataaggtgccacactacacctagcttatagctcttctctatgacaggaagccagatggacgcttagggactctctttcccttctgagcatgatgcctgctccctgccagtgtgcagggtcaatgtgataccttcgaagcagatgttcgttccctctgtgttagtccttgtcagacttcttgcctcatctccctgttgcaccttggagtagtgcagaagtcaggtcatgctcccttcttcccctggcacacactatggctgtgtagtagattctctaggggcttataatcataagagaaaagattttcaatttttttctaaaggcttgtttatctttgtctgatgtatgtgaatgtttacctgcgtgtgtgtatatgtgcaccacatgtgtgcctagtgcctgcagagaccagaagaaggtattgtgtccccctagacactagagtctagtctagagtcaacatgtgggtgttggaaagtaaacgtgggtcctcttcaagatcagcctgtgtttaaccattgagccatctcttcatcctcaagagttttatactattgcttaaggaaaaaccctttcctatcactatgaatctcatctgtggaatcagtccattttgattatggcagagtagatctgaactctttaaagtgatctttagaataaactaaaaggctttgtgttcccacatactgaggctaagcctctccaaacaggccaaccagggcactgtttaccagggctctctctcacttccagttccgttcatgcactcatgcttcctggcacttcctgagccttgtttctttggtaactgtctttgacaaacagccataccacaagaatacctgtggcttcacagtgatgggggtacgcgtgtgtcaaaaacaactgcttgctcttttttataacatttttttcatcttagccacagaaaaaagaagacgcacagctacctcggaaaagctctccgaaatccgcagcccctgtcatggacttgttgggccttggtaagaactgggctttccagctcttatattcttgcagattcagtgacttcgcagcctctctagggagactgggagtcaggctcctgtttgtgtttcctttacgaaaggcgctttctcttgttcttcctgtttacttctgaagagttactcaaagtgtttgctgggcctttttcacagcaacagctcagtgtagtggctgagagagcagagtccccacagtgcagtcagagatcccattcagtttacttaacctttgaatgttccatgcctaaccacgtgctgtgcttagtcagtgtctgcttgaggtgctgctggaaaggtcacctctgtggtttctggccttgtttcacaccaagccctcagtagaagttggcaatttcatgaaacaacacctctgagtcttttgccgctttcctctgctcagctgccagccgaggctccggtgtagccattttctgaggtggtggttactatgcagttccattttggcagttctaatttttgcctcttttaaagagaaagccgttctgtctcacagcaccggtgaggttgtaccatctggtctctgctgctgattcaggttgttgactcccacagctccagtttccatttctctctgcaaatgagtcctgcacaccttgcccttccagtagccgggaggaaacagccactcagctgaggcactgatgtgaccctcaagcctgagtttctgctgccctctgacagcagtctgtaacctactccagagccctagtgggaatgtgagtgaggcttcttttgaaacaccctgtccaggctccctgggccctgagcagatagaacctgtggtcttcttctctcacatagaggacaggtctgtaattctgtttttcttcctagatgctcctgtggcctgctcaattgcaaacagtaagaccagcaatgccctagaaaaggatctagatcttttggcctctgttccgtccccttcttcagtttccagaaaggtgagtcttctgcgtgtctcaggatgaaagagcattccagaaaaattgatagcttaatcatggaaccaggtcatgcttccttggtagggctgaactctcatttctcttgattttctctttggtgttgttatcttcttctagcccaagattactgcttcataccattttgtcttttgccctcaaagagtgactatttgaataggcctgtgtcacagggtgacatattataaaggctgatacttgaggtgaactgcttggtctgaagccctaccaaattgttgtgggtatgaaagacttgaatatcacttgcttttatttgtgggatgtcccagaaatagtgtctgtgtcattttgtatattttgttcatactttcatatttccataagcattctcccaaatggatattttgtaaatgaggaacacttagctatggaagttgtttctggctgtactatgataaatagctactctgagatctttgtatgtatgagacagacaggcaggcagacagacagacagacactgggagttatataaccgggaccatatttatcttaggcaaatactttgctggtgagctatctccagtctgtacactgactaaactcagttttctgtgctgcatcattttggggttatttttatttttttcttatcaagtcacattgtttcattgttttgttagagaacaaaggcttgtaccagagcttaattctcaaggcttatcagctatttttcagaagatgctgacttaacataagccataaattcttttctttctttctctactcccctatccatcggtgtttcacactttaccagttttgtccaggctgacctagaactcacttgtatagcccagatagctcagcctctcagctggcctcttgcctcagcctcctaggttctgagctaccacacctggcttgtgagccatgaattcttatcagaagtattaaaagcagcagaaagtgtaagggttcttccacagaggaccggtctgattgtcctgctgccctttgtgagctaggctgtaggttccatgctgactgactttctcactgtcctctgcactaggctgtaggttccatgccaactgcagggagtgctggttctgtccctgaaaacctgaacctatttccagagccagggagcaaatcagaagaaacaggcaagaaacagctctccaaggactccatcctatcactgtatggatcccagacgcctcaaatgcctgcccaaggtagagtctataaggtctcagatgtgctccggggaaagactgagaacaaacatgcaagaattatttattgtgttggaattttactcagccatacagaaaaatgaaatttgaaaacaatggatagaagtggaaaatattttgttgaatgagataacccaggctaagaaatatacataccacgtatataattttactctcacataagtaagcttgtgcaaaaaattatgtgttagaatccacatataagagtacttgtggctagagcccagtaaaatagaaaggggcccaggagagggggaaagaggctttaagagaaaaagatgggaaggctgttagcacgtgtaatatggaaggaggagtaatggaggcacagagtaaagcagggatccaggggtccagggagatccaggggtctggggataggagtgtatgggttggcgggaatcatccaaaagtaagtgtgtatgaaaaatgccataaagaaacatgttccattgtatactaatttataaaaggaattgttttgttatgacaaggactagttaactctgaggtcagcgacattacatataaaacaaacttgaatatggctttgcagaggaggcttcagagtgagtatctgcagatagatataatgtcaccagagctatacttctatagggtctagtgtcactcttctgtgaagtctgactcaaagtcagggtctgcctccgaaagggaatgactagatcagagtgtggcctgatgagaaccatagaaaggcttgtacaggattcatcctgctgctttctgtggagaccatcttcctggaaaggaacggccggtgagtatgtgggccgactgtgtcttctcctctgacagacccatatgtgtgttttcttggcagcaatgttcatggctcctgctcagatggcataccccacagcttaccccagtttccccggggttacaccacctaacagcatcatggggggcatggtgcctccgccagtaggcatggtagctcaaccgggagcctctggaatgctaacccctatggccatgcctgcaggctatatggggggcatgcaggcgtccatgatgggtgtgccgaacgggatgatgaccactcagcaggccggctacatggcaagcatggcagctatgccgcagactgtgtatggagttcagccagctcagcaactgcaatggaaccttactcaggtaagcagcctcactgtgcctgggacaagacttcagagccttcctcagtgtctgacctggtgccactcctggatcccccaaatcttccttatatagacaagctaatgccaaagatataccttgtttttatttccctggaaggcctggcagaagttagagattcctgagtttctgtaggaactaagtctgagtctctccacaacttctccaaaacgaaatcaaacctctacagacaagcaaggagtacaaataaaaccactgttgcgggcttcagtgacgtgatacttggcacaagagcatcctatctcactgagccagcacctcaaaggaaactgtgcaaaaagaagagagggagtaaaggcctagaggtgactgagccaggaagagaaagtcccatcctggtgtaggcctacgtggggcagactgaaggcatggagagtaaacctctcattaactgggctttgcagttaacaagagacacacaggtgtctaggttggttacttgggaaggcattgtgtagcgggaggccagcaggaggtaggaggaggaaagtcttactgctttcttttctttttttttttttttctttttcaagacagggtttctctgtgtagccctagctgtccaggctggcctcaaagtcacagagatctgtctgcctctgcctctgcctccccagtggtgggattcaagacatgctctatccccgcccaacaggaagatccatcttatatatttggagaaactgatgcacagcagtcaactttgtttgtttgtttgtttgtttgtctgtttctctctctctctctctctctctctctctctctctctctctctctctgtgtctaagattttacttattttacgtatatgagtacactgtagccgtcttcagacataccagaagagggcatcggatcccattacagatggttgtgagccaccatgtgattgcagggatttgaactcaggatctctggaagaggagtcagggctcttaaccgttgagccatctgtccagcccagcagtcaactttcaaatatcaggaagcttttatgacttaaagaacaagaaaattccatgaactgaggccacctctgtacatgtctccctacacaagtctatcagccatacattaaacaaggagtcaacacccaggctgacaataggctttagatcagaggaaagggctgaaacagtgacgtgtggactgttgtggcaccgtgacattccttgggtgtgctacagagtgattctgggagcgcgttcatcctcatgaggtgcctcctgacctccaagaggtgaatggtacgatgcctgcagcttgtggtttccctcaaaattattttaaaggttttgtatacatatacatgtatggatgattcacacacacacacacacacacggaaaatttttaacagctagtaaatttaaagatgaaacgtggatttttgttatattatttttccagtttttacctaattttcaattttaaggaaaactgaaaattttttgaaaagtttatggaaaaagaagagtttatttatacagcaaacatactggactcaggggacttataattatttatctaacagattgtcagtttgtgtttcaatctaattacaaggaagtccctactggccagcatagtagcacaagtccctaatcctagtggactcatgtgccactcctagtgccacttatgtggcagaggctagataatcactgcaagtctgagcccagcctgatatacaaggtgagttcctggctagtcagtaatacacagtgagaccctgtcttaaccaaacagcaaaaaggagactctgtcccacccatctgcactctcctggttggagatggaagacttgcaggttgtttcccattcttcctttgtttattcagtaggaagccccatcaccccacattcccaagcaagcatgcctaagcactgacactggcagtgatgccctctgctggtgatgaggtggagcactagcaggagtctgtctctggactctgcagggcaagctgtggccagctgacaatagtcccttcagtgaggatatgaggagagtcctggaaaagaagagacgttcactggaggcatttctgctgaccagactcaggagtccttcttacctcccacaacagaaggacccttcccctgctctgtgcagtgcccatggcctgatctgaaaaatctctgtccttttcagatgacccagcaaatggctgggatgaacttctacggagccaacggcatgatgaactatggacagtcaatgggcggtggaaatggccaggcagccaatcagactctcagtcctcagatgtggaaataaaagcaaagcacctgtatggctgccactctttttgacccttgctttcctccctcctctttttcccccagccttcccctttcctttttcctacctctctctgtttggtttagaaactgatcataagtcatatgttgtttggcattctgcctaacccagtctcccttcccagagtcatggacctctctgttgctttatgttggtcatgtccctgactgtccagatttcctcccaccccaccccaccctctcccagcaccagcaccttagaaactattggcagaagagggcacatgagctgcgggagagtgtatacactgatcagtacctcccttgaggctgagcttcctcgcagacccacagaaaggtctataaaggacaagtgcttggcagaggggaaagtagaaagggtctttattggctataagctgtttctaagtgctgagagttttgcttgaagagggagcgagccatcaagttcccagcttttcaggaatgaaagaagttcagcagtcagataatccttgtgtcttgggtcagtttggccctggccctagagtgaggcaagcccttcctatgaagatgagcaaaaatattattccacttcactctgagtgctttcaggatctggggcttcaagactcactgcttcagtcagccttcattagcaccaaagactccatgaaggtcgtcccccacacaaacataccccttgcgcaccttctgcctactttgagccggatctggcctgtgactagaagaccaacccctacgaggaaatgtggagctcaacgtgtgcactgcttgtatgcgtgtggatgtgtggatcccacctgccgcctccccatctgctctgggtgtatttttgttttttatagttctaggtttacaacagagaggagttaatttatcaacagcctaaaactgttgccaggtcatcttacagtttaaaacatgccatctcatcggtagtccctgctcttttccctctcccatctgccagtctctctgtgccctcgtgtctgagtgctgtttgcccaccttttccaggtgtaagaggcagagagcctggacagctttctctctcagccattgttcaccccacttgaaaattcaaacaagaaaactttgcttcaaagatctcatgtgtgggaaccacagcgcctggttgcctttctcctgtgtatgtgtaaattccttaataaatattgcagggaaagaccctttttgctcggctgtcactgtgttactcttggaagacagtgagacatacacaggatttctgctttccaagagcagctgctgccttcacctttgcatcttaaagaattctgtttttagtaccaagggcaggccagtccagaacacagaaagacctttcttcagtgacagtgggagccatgagctgaggggcctggagctctgcactgtaagggtcatagaacattaggatctggagtgctttccctatagatggaaaagctgagacccagagaaagaacacagttaccaagcatacacccttccttggcagagacaatagtagactccaagactgatctgagagcactttgtgctttccctgtacccagagcaaatagtttaaactcctcactaacaaggtcacagtagctccctttgattaagggttgcccagccctccctaagcagtgaaccctaggaagaggtggacttctccatcaggaagcagggatggtgctctgcttggctgggtggggagggtaaatgccaaggacaaggtctgcagtgcattccttcctccagttgactcccctcctgctctcccagagggtactgtgctcccttgctgctctcacagagtaccatgcttcctcccttccccatcgtccaccttcactgtcctttcattagagcacgaggctgagtatacggtgtaaatggaaggatagtacagtagccactcacagcaaggccactggtacccgtatccttgttaactgggattccaacaaattatgatccctagaggtctcagtataaaacagaaccaattgtagtcttaagacaaagtaattcctgtggcacatttaacacaatatagggcaattagcaagcattcaagtgtcagtaagaattatgtgccagactgtgttagacattatttcatccagcacatatttaatgttgtaaacatcatcccagaaactgtctgaggcggcagagacagcacagtaagtaactactttagtggtgtgggctaatttggtaggaaagagggacaattaacaaatgaatttcagagagtattaaggtaagatagtgggcatggggatctgggggaagtatatcagaggcggttatattttaacaggcctgaagaagcagccagtgtagcagagatgtgaaaaatatagagtaaagcaattgtaattgtgtactggaaatgagctggctggagtcatgaggttgggaggtgtcagtatggatgagttcatcctgggatggcatcaagagaggagagctgagtcttgggacccactagattttaggacttggtggtggtggggtgatattggccctgaccttaagctttgaataacacatttataattgctgatacaatagatatgagctggcatcagggtgccgtcaggaattcctccaaagaatactggcatccgagctgagtcttagagaggtggcagttagcctgtagtagaggaaaggggaggaatttcccagatagcactgtgtaaacagatcatttgaagaagtgaaagcaagtggagagtcctaaggtataagtgggtctatggtgtgaaatgagacagctggggttggccaggtcacaggagagctccccagatcccaggaaggagtttaccctaaagtgtgaacaatagatttcatgttcctacttgagttctagataacttgctcttgtaccactgtaaataacatgtctaaggaagcaagacgaaagccacagggccagaaagacagtcctggaataggactagggaagaatgggctgattctagttagcagttttatgcctgatgagtcacttgagatgctattcggtgtcccttagaaatcctaaaataagcttgggaaagattgcattctagatacacctcatgtgtatctagaatctaatagcaacagagtagctccagaaagtcctgtagaagaaattttccatggctttctagcacttaacagcctaactttacagaagaatccatcttttaaaaatatataatatccatggaataccatttgggaaactcaactagaaaaattcgccaggagataaagctgggaggtcagcaatgtctagggtgggatggagggagagagagaaatgaaagaaatctgagtctagggcatgccaaagagcctcatggaaggagtggattggatcggaaacggtgtaatggtaaaatgaaaagtatgagctacgaaaggaactttgagggaataattcattctgagtaggttgaagaagagatacccaagaaggagagcagattgagtggagatgacgatgcatagtcagcattcttaaggacaagctattgagatggagagatcacaagtgtcaagtcaggagggaagcttaggggacaggatgagaagggacaatcagactcagcatttgacagcgtgcaccgcgtgttcatgggatggcagggctggaaacctaccagtgtgggctgaggactacactgaaagaggtttaaaagtagagaaacaggctatgttatgctatatgtacatagtgaatttctagtgttgttataagaaatagagcgtatgtttcaaaccaatgaagaaaaaagccaataacaactgtctgcctcactctcaggaacaaacaaggtaagaatatattttttctttctttctttctttctttctttctttctttctttctttctctctctctctctctctctcctctctctctctttcttttctttcccttccttccttccttcctttccttccttccttccttccttccttccctnnnnnnnnnnnnnnnnnnnnnnnnnnnnnnnnnnnnnnnnnnnnnnnnnnnnnnnnnnnnnnnnnnnnnnnnnnnnnnnnnnnnnnnnnnnnnnnnnnnnnnnnnnnnnnnnnnnnnnnnnnnnnnnnnnnnnnnnnnnnnnnnnnnnnnnnnnnnnnnnnnnnnnnnnnnnnnnnnnccctccctcctctctctctctctctctctctttctttctttctttctttctttgcccagacaggctgtcctggaactcactttgtagaccaggctggcctcgatctcagaaatctgcctgcctctgcctcccgagtgctggattaaaggcgtgcgccaccaccgcccaactcgtaagaatatattttgatttgcttttttagttatgactttaaattttcatgaagaagcagaaggaccctgttgtccttaacatgaagaagctgaacctcaacagtggttgctgctaagtttccaggtttctcagccttgctggcaacttagctaggggtgtgccgtgctccttcctccaggcggctaaggagtggtttctctcagtaaataaacaatgaggaaatgtatatctatatatatttatatctgtgtaaatacacatctgtatgtatgtgtgcatgcatgcatgcatgcaggtatgaatggcttgtcacaacataataaaagatgctccaaacatgtgataaaggcactgtatatatgaaaaaaaatcattccaaataggaaaaagacaagcaaatcttgtggttgtaggcctgtaatcgcagcctctccagagacagaggctggggaattttgtcgtcagcagagtgagttcaagcccagagtgttggggatatagcttagtgcttacttagcagacacgaggtcctgggttccatcccagcaccccagtaccagaagtgaggagagaaagatatacacacatacacgctcacgcacgtgcacccctactcttgtggacactttaagggataaccaaatttactagcatatccatatgaagaaatgcctagccttactaaaagttggggaattaaaaaggaaagccacagcaaggtatctctaagtgaggcacaagcctccactccctggagaaaggcaggaaaatatctgtaatttcaaggccagccctgctcacgtagttccacaggagcctgtctctgtctctctcagtctctgtctttcttatgtgtgtgtgtgtgtttatgtgtgtatggtgggtgtgttccagaataactaaaaaacaaaacagaacaaaacaattccaagtgttagaatgtgaagcaactatagtagatggggatgtaaactgacccaagttcttgggagaatgttttagtgttagctgttcagattactaataggtaacaaatctgccccttggtgtataccaaatagaaatgcctgtgtttgaacattagaagcataaaaatgttcaagaaagcattattcataatctcccaagctagaaacaatctaaaagtccattaacagaaaaatgggtaactaaatcatggtatattcatgcaatagattagtggcgagaatggaaattatttattgcagcacagttacatgtaattaaatgcagggagctcacaaaatgctaagtgcattttttactgtgtcatctgaaagagtgttacactcctagatatttgagtatttgcctcctaagtatgatatcgtgtgcaatttaacagtaatttcatgccacctaaggtcagtgttgcttcgagttattccaggaatatctcatctcgtttttgagagcagaccttgctgagaagcccagactggccttgatcttgaaatcctcctgcttcagcttcccgagtactctgattacaagggtgtgccagcacagcacacagctacttttccttttaaaccatgacccagccctaaatttatgcactgaattttgttatcatacctgtttggtttctttgtgtgtgtgtgtgtgtgtgtgtgtgtgtgtgtgtgtgtgtgtgtgtctaacttttcagaacattgactgaagagttcagccaatttttggtaggaatttttctttcattcttccttcctccctcccttccttccttcctttcaatttcagaaacttgaaattgggctagtgagatgattcagtgagttaaggcaattgctgccaagactgacaaccgagttcaaaccacagacccacatggtggaaggagagaatctactacaagttgtcctctgatctccatattcatgctcctggcctgtgtgcaccaacacacaaacacatgagcacactgacacacacaaaacaaagtctttttaaagggaaaaaagaaacaagaagttaagtcttgagatttgaaggaggcttgtttcgccattaggaaaatggtaagcttacatatagtactgagactacttactatatagtctacaagaggagaaacatatctacagtctggtgatatctattcacatggacacaactactgcagatttgtggcttaaggtactaaacctagtagctgggcctattttaaaaaagaaattgtacttattttgttgtatgggtagattgtctgcatgtatgtctgtggatcatatgtggtgccatggaggccaaaggggggcattggatctcctggaactggagttaaaaacagtagttaaagggataagataggtgctgggaatccagtctgggtcctgtggaagaccaggaatctctccaagccccagccaggcattttaaaaagtactatagtatctaattacagcatctctgcgttcccttccatccctccagatgggcatatttttaatatacaaatctcaacatgtattggctcaatctgaaactaggatgacagacatgctctttatatacaggaataggtatcaaaaacatgggatcaattactaaacatatcatttctttctgtcaccctgccactggtaggagcccaaagacattttgtttactaaagtcttgaataccacttagttttaatagtgctagcaaggccttagccctgggtttgatctagctactagcactttagggcaaagaatgacatgaccaaaagttcatcttcctgacaggcatggtagtaaaggcctgtaaccccagcagggagactgggagtttgaggacaacttaggctgcatagtaaaatggtttcaaagaaagaaaacagaaaaggaagaaggagagctcagttattagagtgcttgcctagcaggcctgaaaccctgggttcaatccccagcactgcataaactgggctatgtatacacctgcaatcccagaactcaagggatggggcaggagaatctgaagctcagtttattgttggctatatagtgtgcgaggctattctaggctgtgtgagatcatgtccaaaaatcaggtgctagcacctttaaacatcagttagtagccattccctatagaccaagaatgctgatgaagtgtggagaggtggctcagtgcttaagagcacttgctgctcttgtagaggacccaggttcaattccccgcacccacgacatggtgacttacagcttctgtaactctggttccagaagattcagcccctcttctgacttctgcatgtatgtggtacacaggcatacatgcatacacattaaattaaaactatgctgaataaaatttatttcctattttcagtggggttgtataattctcaatagatgcctttaacaatgattcatccacctgaaacccagtggtcaagatggattccaagatctttggaggtggataattgagattagggtgcaaaataaatggcagattactaaagtcctacttcatgtagctaaagtttccccagctttagagacagatattactgagatagaaatgaagccttgcatcctgctgctggacctgagctagaggacagattctgagcctactcagcagaggctgccatcctgaagagtcccattgccattttacccagtaactatacgaggtggatactagcagttagctattgccaaggcctgggtgtatataatgtccttgtccagttatcagatgagatagtatggagctgaggcttgctgtaagaaacctcacccaacagaacctttggcctttctgtcggtggatcctcaagttcctgagtggtgtctagtcagcatccttacatctcttccctcgggcagactggattcactggagaagacttttcaggtatatgtagagagtattgaccagatggaacattctggaaagaaggctaggagtctcaagttcttgatatatgttttcaaaggtccttacccattccagtgtccctattcagcacagagctggtcctcttctatgccccagtgcccattagttctaagtctcctctgagatgacttctccgggctcctggagagagatacaaagaggactgctgtctgactacagagctcagggatgctgggaatcagcactgcctccacagatgtctcactttgactcccgatcaatgtaccccaggcaatctctattggggaattgtaacattcatttttgtcaaattttctatttaatgatggttcttaaacagctccctttttagccctcaacccagcagaggtagtggaaaaagaaaggatacgggggaagtagacctgcttaggagtggttctttgaggcaactcccatctgtgctgtctgaaaattggcagttcagttcacaggtcagtattggcagctcgattcactttacagatataagtcaggatagcaaacataaatcagcagcagtggtgctacctagcaggatagccaggccttagcctccacaccagtcagcagcaggagggaccgggaggaaggccaggagttctctgtgtatctctcaggaaagaaaagatcagtgaagactggagaccaacaagagttgcacagctatctctataaacaaacctagctcagcacacccccaacccactccgggtcattgtcgatattcctccaaatatcacgtgtcctccacggggtcttgcctcagcacgtgcatgtgtctcagctgacatcactctgccaatcagccgagtctgcagaagcagcaagaaactgcagcacaccaccagtcctgtttggtgtgtttttctcatggagtcctgacaaatgcaactacaactacacagtgtgaggcagaccaagcaaagagttctttatcacgtgtcctttcatgtgcttgctttagcagaacatcctttctcctgtgtctgcttcagctaaacatcccttcacgtgtctgccccagcaaaacaccattcaaacgactttccaaagagcccttaagtttctacttcatggaatcctgcagggacagacagggtccttctggctcgtcttgatgcttgcttaggacttgcaccttttcagaactctgtttagcacccatctctatcatccagtttccaaaatgttaacttttctcccttcccattcaacttgtcctgtggatttataagaccctgtccagagagaacagggagggataatcctctgtgtgtccttgtgtactggtacattgttccttggaggagaaaaagctcccataaaaactgggtttttcaagtggggtgggaagatgatctataagatgaatagaaactaggcatgcctgaaatctcagcacttaaaaattgagggtttgctgttagtttgaggtcagtatgggatggtaagctcttgtctcaaaaagaagtaagaactgatcaaattcactggaggcagaagctcagagtagagtatttgtgactctgaaggaagatttttaaccacaatgaacttaactttttaaatgttaactgaaattaaacggggctgagtcccatgtctaggaaaatacacgttgctacatgggcagcttggtggactgtctttccaagacgtgttgcagaaactgtaacacgtacactaattccgagatgtcaaggacactagtgtttggtggagggtagtgaggctggttagacacgatagctcatttcacaggagagcctggcttccaggcacgttgttcacacattcggggactaatctgggtcatctcaaaagcagaccctgagacaaagaagggcatataagtcatgtatttgtgaaactcaggaaacagcagtgggaagcagaggaaacaagacaaggaaaggcagacagtgagtaaagtgtgggttattcttaggttgtttgtgggtgccgtgcatgcaagtgtggtaagtgtgtgtgtgtgtgtgtgtgtgtgtgtgtgtgagagagagagagagagagagagagatcaagccagatgctttcatccctcctttcttttttcttcctttctttgaaaccttcttactatgtagcccaggctgtccttaaactcccagtctccttgctggtgttacaggctttgctaccatgcctggcaggaagatgaacttttggtcacatcattctttgccctctggtactggtggctagttgtccaaaagccaaggccttgctaagaagggactctacactccacccacaacttcaccacaaggcttccctttttcctttcctttctttccaatttaaaaaaaaaaaaatcttaatgaattaccaattttactttttatttaaaaaaatttttttgtgtgcctggggatttttgcttgcatgttttgtctgctaaaccactgggaaagctctttagcccctgaattgcaaaattttaaatggatcacttatcttaaaagtgggaccattttaactttattatttttagggtttttaaaagtatactttttaacatcaaaaaatttaaaaaacattttaacacaatagaaatccttaatatagacatctaaattttcttttctttattatgtcaaaacaatatgcagttaagaaatagggagaagaaacgggggttgcacacctttaatcccagcactgaggatgcacaagcagtcagtctctgagttccaggccagccagggctacacagagaaaccctgtctccctccaagagagagagagaaagagagaaatagggataggagacagagggagagtgtgaagtgcatacaggggccattattacattattacacaggacgcagtcagagtgctaacttgtacctcaaaacatctgtggaaaacagtttcgttcaccagcagataaccccttccaaaccgagg

SEQ ID NO: 909 - DNA, 2554 bp, Mus musculus
  misc_feature (1)...(2554): n = A,T,C or G
ncaggggttcttggggggtgcagggggcgcgtcgccctctgcccccgccggcaccctggccatgacaggcaagtcggtgaaggacgtggatcggtaccaggcggtcctggccaacctgctgctggaggaagataacaagttctgtgctgactgccagtccaaagaaaggaaaggggagagcattggcatgggggacaaattgatcttttacattcctagtgatggagacacggtttttgattcatccttaataagtgtttgtagagctgttgaaggatttattcgagataaatatgagaagaagaaatatatggaccgaagtctggacatcaatgtccttaggaaagagaaggatgataagtggaaacgagggaatgaacccgctccggagaaaaagatggaacctgttgtttttgagaaagtaaaaatgttccgttcatgcactcatgcttcctggcacttcctgagccttgtttctttggtaactgtctttgacaaacagccataccacaagaatacctgtggcttcacagtgatggggaaaaaagaagacgcacagctacctcggaaaagctctccgaaatccgcagcccctgtcatggacttgttgggccttgatgctcctgtggcctgctcaattgcaaacagtaagaccagcaatgccctagaaaaggatctagatcttttggcctctgttccgtccccttcttcagtttccagaaaggctgtaggttccatgccaactgcagggagtgctggttctgtccctgaaaacctgaacctatttccagagccagggagcaaatcagaagaaacaggcaagaaacagctctccaaggactccatcctatcactgtatggatcccagacgcctcaaatgcctgcccaagcaatgttcatggctcctgctcagatggcataccccacagcttaccccagtttccccggggttacaccacctaacagcatcatggggggcatggtgcctccgccagtaggcatggtagctcaaccgggagcctctggaatgctaacccctatggccatgcctgcaggctatatggggggcatgcaggcgtccatgatgggtgtgccgaacgggatgatgaccactcagcaggccggctacatggcaagcatggcagctatgccgcagactgtgtatggagttcagccagctcagcaactgcaatggaaccttactcagatgacccagcaaatggctgggatgaacttctacggagccaacggcatgatgaactatggacagtcaatgggcggtggaaatggccaggcagccaatcagactctcagtcctcagatgtggaaataaaagcaaagcacctgtatggctgccactctttttgacccttgctttcctccctcctctttttcccccagccttcccctttcctttttcctacctctctctgtttggtttagaaactgatcataagtcatatgttgtttggcattctgcctaacccagtctcccttcccagagtcatggacctctctgttgctttatgttggtcatgtccctgactgtccagatttcctcccaccccaccccaccctctcccagcaccagcaccttagaaactattggcagaagagggcacatgagctgcgggagagtgtatacactgatcagtacctcccttgaggctgagcttcctcgcagacccacagaaaggtctataaaggacaagtgcttggcagaggggaaagtagaaagggtctttattggctataagctgtttctaagtgctgagagttttgcttgaagagggagcgagccatcaagttcccagcttttcaggaatgaaagaagttcagcagtcagataatccttgtgtcttgggtcagtttggccctggccctagagtgaggcaagcccttcctatgaagatgagcaaaaatattattccacttcactctgagtgctttcaggatctggggcttcaagactcactgcttcagtcagccttcattagcaccaaagactccatgaaggtcgtcccccacacaaacataccccttgcgcaccttctgcctactttgagccggatctggcctgtgactagaagaccaacccctacgaggaaatgtggagctcaacgtgtgcactgcttgtatgcgtgtggatgtgtggatcccacctgccgcctccccatctgctctgggtgtatttttgttttttatagttctaggtttacaacagagaggagttaatttatcaacagcctaaaactgttgccaggtcatcttacagtttaaaacatgccatctcatcggtagtccctgctcttttccctctcccatctgccagtctctctgtgccctcgtgtctgagtgctgtttgcccaccttttccaggtgtaagaggcagagagcctggacagctttctctctcagccattgttcaccccacttgaaaattcaaacaagaaaactttgcttcaaagatctcatgtgtgggaaccacagcgcctggttgcctttctcctgtgtatgtgtaaattccttaataaatattgcagggaaagaccct

SEQ ID NO: 910 - protein, 441 aa, Mus musculus
QGFLGGAGGDSAPAGTLAMTGKSVKDVDRYQAVLANLLLEEDNKFCADCQSKERKGESIGMGDKLIFYIPSDGDTVFDSSLISVCRAVEGFIRDKYEKKKYMDRSLDINVLRKEKDDKWKRGNEPAPEKKMEPVVFEKVKMFRSCTHASWHFLSLVSLVTVFDKQPYHKNTCGFTVMGKKEDAQLPRKSSPKSAAPVMDLLGLDAPVACSIANSKTSNALEKDLDLLASVPSPSSVSRKAVGSMPTAGSAGSVPENLNLFPEPGSKSEETGKKQLSKDSILSLYGSQTPQMPAQAMFMAPAQMAYPTAYPSFPGVTPPNSIMGGMVPPPVGMVAQPGASGMLTPMAMPAGYMGGMQASMMGVPNGMMTTQQAGYMASMAAMPQTVYGVQPAQQLQWNLTQMTQQMAGMNFYGANGMMNYGQSMGGGNGQAANQTLSPQMWK

SEQ ID NO: 911 - DNA, 69648 bp, Homo sapiens
acaaaagacagtcttgaattgctgatgccactaaccccttccccaccagcagccgtgtggatcagagagagaactggtgtgcttgggggaaggagagtgcagtgattgtgggactttacattagaactcagtgctgccttgtcacagtggaaagcaaccctgggcagaactcagctggtgcccccagaggcagcatttagaccagctgtagccagaggggaatcacgaagctcactaagcttagtctcaccaagctcatttgcatgtgacaaataacactgagctcatagtaaaacagggagcataattatccagctttctaaatgaacaggtcattctatgagtgttatctggtataggtaaagtgactggccagtgaatcagaaactgattaacatatggcttaagagattttgatctcttagctataagatacactaatgagagtttcctgtggcaatagtccaaaaatgttcaccatacctctttcttggtagtaatctgggcattttattactgtggcttctctagtatagtggtttttattttgtccttatttatgtgagttggggtttcaaaatactctgatttaaagaaaaaaaagagggcaagcaaggtggctcacacctgtaatcccagcactttgagaggctgagtggggaggattgtttgaggccaggagtttgagacagcctgggcaacatagccagatcctatttctgcaaacagaaaataatttattaaagaaaaataagatgggccaggcacagtgattcatgcctgtaatcccagcactttgggaggccaaggcaggaggatcgcttgattccaggagctcaggaccaacctgggcaacatggtgaaaccctgtctctacaaaaaatacacaaaattagctggacatggtgatgtacgcctgtagtcccagctactcaggaggctgaggtgggaggactgcttgagcctgggaagtcgaggttgcagtgagctatgttcgagcctctgcactccagcctggatgacaaagtgagaccctgtctccaaaaaaaaaaaaaaatggctcaaggctgtggatatcctccacagggacatcaaggtgctgaaaagctcaataagaataataatcggtcaaacagctgtcaaaaagtataatgtctttttagcctcagagtctctgatcaagcagatcccatgaatccttggcccaggcctaaataaggtgggtaagttccctcccctgctgacacacaacgaaaacatggtggccaaagtggatgaggtgaagtccacaacccagtttcagatgaagaaggtgctatgtctggctgtggctgttggccatgtgaagatgacagacgatgagcttgtacataacattcacctggctgtcaacttcctagtgtcattactcaagaaaaattgccaagacattcaagctttatatactgagagcaccgtgggcaagcccacgtgcctgtattaagccacattctaggctcatgcctgtaacctcagcactttgggaggccaaggtgtgaggatcattttaggctatgaattcaagaccatcctgagcaacaaagcaagactccatctctatttcaaataatttttaaaaggcacattctaataaattctactgccaccaaagcaaaacaaaacaaaataaaaacaataaagagaaattatctggaagctgagtatgaaatgtggtatcaggattcttcaattcattccaattttctgaaatccattagatacagtgcaaccaaactatgctcagtggccactgggacagatagaaaattctataactggatacattcggggaggagccaagatggccgaataggaacagctccggtctacagctcccagcgtgaccgacgcagaagaccggtgatttctgcatttccatctgagacctgcagctgagggtcctgtctgttagaaggaaaactaacaaacagaaaggacatccacaccaaaaacccatctgtacatcaccatcatcacagaccaaaagtagataaaaccacaaagatggggaaaaaacagaacagaaaaactggaagctccaaaaatcagagtgcctctcctcctccaaaggaacgcagctcctcaccagcaacagaacaaagctggatggagaatgactttgacgagctgagagaagaaggcttcagacgatcaaattactctgagctacgggaggacattcaaaccaaaggcaaagaagttgaaaactttgaaaaaaatttagaagaatgtataactagaataaccaatacagagaagtgcttaaaggagctgatggagctgaaaaccaaggctcgagaactacgtgaagaatgcagaagcctcaggagccgatgcgatcaactggaagaaagggtgtcagcaatggaagatgaaatgaatgaaatgaagcgagaagggaagtttagagaaagaagagtaaaaagaaatgagcaaagcctccaagaaatatgggactatgtgaaaagaccaaatctacatctgattggtgtacctgaaagtgatggggagaatggaaccaagttggaaaacactctgcaggatattatccaggagaacttccccaatttagcaaggcaggccaacgttcagattcaggaaatacagagaacgccacaaagatactcctcgagaagagcaactccaagacacataattgtcagattcaccaaagttgaaatgaaggaaaaaatgttaagggcagccagagagaaaggtcgggttaccctcaaagggaagcccatcagactaacagcggatctctcagcagaaaccctacaagccagaagagagtgggggccaatattcaacattcttaaagaaaagaattttcaacccagaatttcatatccagccaagctaagcttcataagtgaaggagaaataaaatactttacagacaagcaaatgctgagagattttgtcaccaccagacctgccctaaaagagctcctgaaggaagcgctaaacatggaaaggaacaacccgtaccagccactgcaaaatcatgccaaaatgtaaagaccatcgagactaggaagaaactgcatcaactaacgagcaaaatcaccagctaacatcataatgacaggatcaaattcacacataacaatattaactttaaatgtaaatggactaaatgctccaattaaaagacacagactggcaaattggataaagagtcaagacccatcagtgtgctgtattcaggaaacccatctcacgtgcagagacacacataggctcaaaataaaaggatggaggaagatctaccaagcaaatggaaaacaaaaaaaggcaggggttgcaatcctagtctctgataaaacagactttaaaccaacaaagatcaaaagagacaaagaaggccattacataatggtaaagggatcaattcaacaagaagagctaactatcctaaatatatatgcacccaatacaggagcacccagattcataaagcaagtcctgagtgacctacaaagagacttagactcccacacaataataatgggagactttaacaccccactgtcaacattagacagatcaacgagacagaaagtcaacaaggatacccaggaattgaactcagctctgcaccaagcggacctaatagacatctacagaactctccaccccaaatcaacagaatatacatttttttcagcaccacaccacacctattccaaaattgaccacatacttggaagtaaagctctcctcagcaaatgtaaaagaacagaaattataacaaactatctctcagaccacagtgcaatcaaactagaactcaggattaagaatctcactcaaagccgctcaactacatggaaactgaacaacctgctcctgaatgactactgggtacataacgaaatgaaggcagaaataaagatgttctttgaaaccaacgagaacaaagacacaacataccagaatctctgggatgcattcaaagcagtgtgtagagggaaatttttagcactaaatgcccacaagagaaagcaggaaagatccaaaattgacaccctaacatcacaattaaaagaactagaaagcaagagcaaacacattcaaaagctagcagaaggcaagaaataactaaaatcagagcagaactgaagaaaatagagacacaaaaaacccttcaaaaaatcagtgaatccaggagctggttttttgaaaggatcaacaaaattgatagaccgctagcaagactaataaagaaaaaaagagagaagaatcaaatagacacaataaaaaatgataaaggggatagcaccaccgatcccacagaaatacaaactaccatcagagaatactacaaacacctctacgcaaataaactagaaaatctagaagaaatggataaattcctcgacacatacactctcccaagactaaaccaggaagaagttgaatctcttaatagaccaataacaggagctgaaattgtggcaataatcaatagcttaccaaccaaaaagagtccaggactagatggattcacagccgaattctaccagaggtacaaggaggaactggtaccattccttctgaaactattccaatcaatagaaaaagagggaatcctccctaactcattttatgaggccagcatcattctgataccaaagccgggcagagacacaacaaaaaaagagaattttagaccaatatccttgatgaacattgatgcaaaaatcctcaataaaatactggcaaaccgaatccagcagcacatcaaaaagcttatccaccatgatcaagtgggcttcatccctgggatgcaaggctggttcaatatacgcaaatcaataaatgtaatccagcatataaacagaaccaaagacaaaaaccacatgattatctcaatagatgcagaaaaagcctttgacaaaattcaacaacccttcatgctaaaaactctcaataaattaggtattgatgggacgtatttcaaaataataagagctatctatgacaaacccatagccaatatcatactgaatgggcaaaaactggaagcattccctttgaaaactggcacaagacagggatgccctctctcaccactcctattcaacatagtgttggaagttctggccagggcaattaggcaggagaaggaaataaagggtattcaattaggaaaagaggaagtcaaattgtccctgtttgcagatgacatgattgtatatctagaaaaccccattgtctcagcccaaaatctccttaagctgataagcaacttcagcaaagtctcaggatacaaaatcaatgtacaaaaatcacaagcattcttatacaccaacaacagacaaacagagagccaaatcatgagtgaactcccattcacaattgcttcaaagagaataaaatacctaggaatccaacttacaagggatgtgaaggacctcttcaaggagaactacaaaccactgctcaaggaaataaaagaggatacaaacaaatggaagaacattccatgctcatgggtaggaagaatcaatattgtgaaaatggccatactgcccaaggtaatttacagattcaatgccatccccatcaagctaccaatgactttcttcacagaattggaaaaaactactttaaagttcatatggaaccaaaaaagagcccacatcgccaagtcaatcctaagccaaaagaacaaagctggaggcatcacactacctgacttcaaactttactacaaggctacaataaccaaaacagcatggtactggtaccaaaacagagatatagatcaatggaacagaacagagccctcagaaataacgccgcatacctacaactgtctgatctttgacaaacctgagaaaaacaagaaatggggaaaggattccctatttaataaatggtgctgggaaaactggctagccatatgtagaaagctgaaactggatcccttccttacaccttatacaaaaatcaattcaagatggattaaagatttaaacgttagacctaaaaccataaaaaccctagaagaaaacctaggcattaccattcagaacataggcatgggcaaggacttcatgtccaaaacaccaaaagcaatggcaacaaaagacaaaattgacaaatgggatctaattaaactaaagagcttctgcacagcaaaagaaactaccatcagagtgaacaggcaacctacaaaatgggagaaaattttcgcaacctactcatctgacaaagggctaatatccagaatctacaatgaactcaaccaaatttacaagaaaaaaacaaacaaccccatcaaaaagtgggcaaaggacatgaacagacacttctcaaaagaagacatttatgcagccaaaaaacacatgaaaaaatgctcatcatcactggccatcagagaaatgcaaatcaaaaccacaatgagataccatctcacaccagttagaatggcaatcattaaaaagtcaggaaacaacaggtgctggagaggatgtggagaaataggaacacttttacattgttggtgggactgtaaactagttcaaccattgtggaagtcagtgtggcgattcctcagggatctagaactagaaataccatttgacccagccatcccattactgggtatatacccaaatgactataaatcatgctgctataaagacacatgcacacgtatgtttattgcggcattattcacaatagcaaagacttggaaccaacccaaatgtccaacaatgatagactggattaagaaaatgtggcacatatacaccatggaatactatgcagccataaaaaatgatgagttcatgtcctttgtagggacatggatgaaattggaaatcatcattcttagtaaactatcacaagaacaaaaaaccaaacaccgcatattctcactcataggtgggaattgaacaatgagatcacatggacacaggaaggggaatatcacactctggggactgtggtggggtagggggaggggggagggatagcattgggagatatacctaatgctagatgacgagttagtgggtgcagcgcaccagcatggcacatgtatacatatgtaactaacctgcacaatgtgcacatgtaccctaaaacttaaagtataataaaaaaaaaaaaaaaagaaaagaaaattctataactggccaggcgcggtggctcatgccagtaatcctagtactttgggaggctgaggtgggcgggtcacgaggtcaggagattgagaccatcctggctaacagggtgaaaccctgcctctattaaaatacaaaaaattagccaggagtggtggcacgtgcctgtagtcctagctacttgggaggctgaggcaggagaattgcttgaacctgggaggcggaggttgcagtgagccgagatcgcaccactgcactccagcctggcgacagagcgagactcggtctcaaaaaaaaaaattttataactaatgtggaaacagttttatgataagataacatgtgcatgatggaacagagtgaacatttttgcaagactagtcaaagcaaaattcaagacttcaaaaaaaaaaatgtgtacttgggaggagcagtttgctttgtttatatcctcagaccctgggctatgcactcactttactctgctattagtaatgataataaaaagagctaatacttgatgtatctgctaggataggctagcttatacagtggtaaacaaacaaaactcaatggcaacacaatgcttatttcttgcttatgctaagttatcctctatgggctggcagagagctcttgtttatcagctacacagaaatccaggctaatagagcaaccaacatcttcagcatcaatagttgccatgccagagggaaagagaagcacaagaggctcaaagcaacaaataaatgcttcagagacaaagtaatccatcctttctgctcaaactcattggtctttcccaatcacttgaaggccaggaaataaaatcctaccatgtgctcagaaggcaaaacgccagaaatatttagtgaagagcgctaattgtctatcattcactatctaccaagggctgttctaattatattacaggcattatctcagctaagcctcataataatcttgtgaaataggtactattaatgttatcatcattcccattctatagatgaaataactgaggcaccaagaggctaagtaacctgctcaaagtcacacagataataggtggtaaaagctgaagatttaaacttaagcattcttgccccagagtctgtgtgcttaaccacaaagccatgagatctctcactaggtgggaacaatttgagaaacactgccataggcaatggagagccactaaaggattttttaagcaggaagtgtgagtccatcagaattggcatttaaaagctccctctagagagcacggtgaaggattaatttaaccagatttagactaaggcaggaaggctatttgcagagtgaggagatgaagatggggagggcttgaactaaggtacaatcaccactcaccgcaattaactgggttttgttgttgttgttgttgtttgagacagggtaacggggtacattgggggttggaggggtggttcttactgtgttgcccaggctggattccaactcctgggctcaagtgatgctctggctctggcatcctgagtagctaggactacaggtatgtgccaccacacccagtaactagttaatcttgactgtctatttcaactgaaaaatggttatggtaatacctacttggatgggttttctgaggaaaaacaccccaatgaacttgtgtgtttttaaaagtcaagtcccctaggcatggctagaagggaagaggcttagccagaaaatttaattgttgtgattaataaagtaatagaaatgtttagttttcctctgatgagatgaaagctttgaggggatcctggtcttgggagaaagtaaagaaatggaggagagggtttcaccagagtttagataactcttagcatctgcttactatcttccctgattaattatttccatggcagccagagtgaccttttaaaaccacaaatcggatcatgctgtttccctctcccctagtacagtgcctgatacttagaaatttctcagtaacatcgtgctcagtgaatgaatgaatgaatgagtgaatgaaaacacaagccagatggcaggtggatccctaaggaaaaggacagccaatgagaaattatgtgtagcaacggtggctttggatgatgatgtttaataatcatttttaaggagttgcctgttgtgtgctatgctttaatcactgtcccccacccttcccaaataacgttcagtaaaagtctgccacaaaaaactcgctgttttgtgagaatttaagaaatggaagaagaaacaaactgtctgggcaccaggccaaacaatatccaaaaaggcaggagtcacagaggagagctaatgagtattagtgggagcaggtattccaagtgagaggtgaccagagtcctctgaaaatgtggggagggggtgacgttcctatatcctgggttaggggcttggactcttctatttggctgttggaaaaaacaagctggaggactttggggtatcaacaaccctcaggttacataaggatgatcatagggtcgttgtgaggattatgttgggatagttcatgcaaagcgcttaacacagtgcctagcgcatagtaagagctcagtaaatgttagttgttgtcttccttcactttcttccattccctccactccctttctaccaggctccattcattctcttccaaggacacgcagggggcgtgcccaccccttccctccgcccccacccaaggcccgccccccgcttctccacggattggttcccgagaggcggagctgaaggaagagcccagtgcggcgcggtgggggcggggcgcatgcccgagctgggcagggtggaggtggggaggaagagctgccggaagtaggcggtggaggtggtagcggagctgacggcagctgccagggaaaccgaggcgcgggacgcaaggccagcagacaggccggccagagggtcatctgcgtccggcacccaggaggctcgtggtccgcctttgcctgggctgagggtctctggccccgcagcctctcttggaggcgggcctgtccctaagcccgccaaggggcgccgcgcccgaggggctgcggagtgggggacggacgcccccgacccgggaaggggcgtccggcggggccggaggagagggctctccccgctcaggaggtgcccctgggcgggggaccgggagtcctcaaccccggactgaggcaggggtctctgggggcgaggagggcgcgtcgccctctgcccccgccggcaccctggccatgacaggcaagtcggtgaaggacgtggatcggtaccaggctgtcctggccaacctgctgctggaggaggataacaagttttgtgcagattgccagtctaaaggtagcgcatcccacctggcgggccaggggtccagccgcgccggggtggtgggggtgggctgcgtgaagaggcggtttctgaagcttaggccgcccaactcggcttataagtggtaacgcgtgctgcgcttgcagtgagcctactgggctttctgcagctgggggattggtatgggtagagcttgcgagggcgagtctgtgtgtgtcggggagggtggaggtgatggtgcgggtggaagttgcctggcgtgttcaggtgagaatgtctgtatttgagggctctgaatgagttctgggccggctgtccagagagagctcccagcatgtcacttgcaaagctggggatgaactgcattgcgtgcgtgcgtgcgtgcgtgcgtgtgtgtgtgtgtgtgtgtgtgagagagagagagagagagaatgacgaggaggaggaggagggaagtgagatggcggaagggaaaactgcttaaatgatttttaaaggtggtgatttttgcttcctgctatttggttagcaactcctgtcattttgcagccttgctaagatctgacaagagtgcttaggtgactttattcttctggatgtgtgcagtgggaaactgccttatgcagtgacacagtgcggatttctaggcagtgtagccctggcttgtagagtgcgttggaggcctatgtatgagtggtggcagaaactagccgattatgcctgtagtgcaggatccgtttaatcagtggagagagaaagatgaattcgatgaattcattgcttccatggcgattacacttctaaaggtgaaatatgatcattgtaaattggcagaaccatttagtctttgttttctgtgccctagaagattcatgatttgatacaattaaaagtcagtacaataggaaatcttggttattagtgaaatgttggcacttgacatttatacaagcttctatgaatctttttttcctgtattttctaattcttttggcatataattggaggattgggaaaattattttccctttggttgggtcgaaatggatagttatattttgggggcgacaatttacttttgttcataatgcagtggatttgccatggttgtttgccgtacagcgtagtgggcatatactataaaacaaagattcagttatattcgtatttatctattttgagaaaggaaggacatatttaattgatgctttcacttaattaccttttatttttgaagaataaggttataaaaggagaacaggggagggatacatagacacctagtaatgtattttagtgacctctaccaacagataaatggaatgtgccattaggaaaacaaattcctagacttctttcctgaatttttgcattagcaataattcattttaaaaagtattttagaatcaatttatgttgagtaggttagcttcttgattcttgttacatcttctgttaggtctattggaagatttggtttattttaggagtgtatcttggctttattcaaattcccttatgtcctcatttgacagatcttgagtcacagtgaagcaacccactggagtgagcattgctgcatttggagagtcagatgccattttggtgactagaaccccccccccatttctcatattacccttatacttactcatattccaataaaatacagcacatggaagagagaggctgattcactacttcttcctccaaatttccattgctttttatttattttattttttatttttattttttgagacagtttcgctttgtcgcccaggctggagtgcaatggtgcaatctcggctcactgcaacctctgcctcccgggttcaagtgattctcctgcctcagcctcccgagtacctgggattacaggcgcccgccaccatgcccagctgatttttgtatttttagtagagacagggtttcaccatgttggccaggctggtcttgaactcctgacctcaggtgatccacccgcctcagccttccaaagtgctgggattacaggtgtgagccaccatgcccagcccgaaatttccgttgctttttattaataagcttactggggatcaggttatgaaatatcagttaattcttaatgagaactagtaactgctggcttgtaaactttattaactactgttgatggtagaatcctggatcctcaatttcttttcagaagttcgttttacattttaccaggtggcttcagggacttggtcattgtattaaaaatgagatgacaatgggtcagtcatctttagattatgacaaataggcatttgttgaggcctctgtttatccaatttatgaattacctatcccattccacccctccaagccctctcactctttttcccctgctgttttctaattttggttgtcataatgatcatttggacaactatcagattgttgaaggaaaagacgtttggatcaataaattgttacctgttagcgctgataaaaaatacatttcattggaggaggaatttaaaaagtgttggctaaaatgagaattgggtttcagtttatttacctgtattcctgtgtcctttcctaaaaaattggaagttaactgtacaggatatggtgagtgattgctcatctattaatatccagttagatgatgtggcatagactatcgacctatgagcaggtatttttgcaatgttccaaaatataactctttggcaatgacttttatttttaaattcttatacttatttaggaacatttattagttgactttcaaggtatgtgatttaaacttcggaatagaggctgggtgtggtggctcaaacctgtaatcccagcactttgagaggccaaggagggaggatcacttgagtccaggagttcaagaccagcctgggcaacatagtgtgaccttgtctctacaaatagttaaaaaattagctgggtgtggtgttgtgcatctgtggtcccagctactcaggaggctgaggcaggaggatcacctgggcaactgagcccaggaggtcgaagctgcagtgggccatgattgagtgccactgcgctgcagcctgggtcagagagcaagaccctgtctctaaaacaaaacacaacaaataaacatcagaatagagaacaagcttgtgttctttttacttcgtacaagttttgttgatcctggggtttttaactgtcctgggcacgagtcttaccagtttctgggaccactaaaccattccagtaatttcagtgtgggaaaggaaactgctttggggctgcctatttaagaaatgctatgattctctctaggctcaagatgtgatttcttcattacccaaagccctggggttaatgtgacttttagggtgaacttttggactaacttaggtagtgatagaacagaggacaaaactactgaaaattccagatatgtcaatggtaactctggctgattgaggctgggttccatttttgggtatgggtcatacttcctttgtacttggggtcatactggtccaagttttaacttctagctcagcagttccagattttatcagtgtgtcaggaataattgctaagccaccccgtcagagactgtgttttaaactggacactatcttatttaccatgaaaggatctacagttgtcctttggtatccaggggggattggttccaggaaccttctggggtactaaaatccacagatgctcaagtccctgatataaatgttgtagtgcttgcatataacttatacacatcctcccttatactttaaatcatctctagattacttataatatctaatacaatgttaatgctatgccagtagttgttactctgtataatttagggaataatgagaaggaaaaaagtctgcacatgttctgtacagatgcaaccattcattttttactgaatattttctttcctttttattttttttagagacggggtcttgctctgccacccaggctggagtgcagtggtgcgattatagctcactgtagcctcagactcctgggctcaagctgtcctcccacttagcctcccaaagtgctgggactacaggcgtgtgccacggggcccagccattttttcgaatattttcaatctgcagttgtttgaatccacagatgcagaacccatttctaatggagggctgactatacctttctgatgacctaaatatttgtgtccactattgggacactcctttcttagtgtcaaggtttgtgagaaattgagggctgtttgatgggcaaagatttatttatttatttactggcttatctacaattgagacagggtctcactatgtttctcaggctagttctaactcctgggctgaagcagtcctcccatctcagcctcccagagtgctgggattacaggtgtgacacaccatacccggcagagcaaagagttaagagtacaagacatttgatcatcttgaggagtatttacttcagactgaaacaccacatgaaattctagagtccaacagaaagtgtaataattttttgcttttcccttcttctgctacatcctatctctgaaatgtttcaccccacccaaccactgcctctgttccaactcctatatttttaaatctacatttaaatgtactttttgaaaaaggtagcactttcatgtagttcaaaatccaaaaggtccaaaggggaatatgtacggtataaaatcattctgctgtccctcatctctgagccaccattttcactccgtggaagtaacaattgttggcaatttcttttcttttcttttcttttttttttttttgagacagagtttcgctcttgttgcccaggctggcgtgcgatggcaagatcttggttcactgcaacctctccctcctgggttcaagtgattctcctgcctcagcctctcgagtagctgggcgcccaccaccacgcccagctaatatttgtatttttagtagagatggggtttcaccatgttggtcaggctggcctcgaactcctggcctcgggtgatccaccaacctcagcctcccaaagtgcttggattacaggtgtgagccaccacacctagcccattgtcggcaatttcttacgtgacttttaagagataatgtatgcatagacaaacaattacatttaaatatattcctttgcagtgcttttatgcaaatggtagcatattacccacagctcttgacatctgtatttttcaatcaacagaacatggagagcatacactttccatgcacattgaggagtgctttgttctttgaaggtattttctaaggctgtgaccaagttatcttgactaagtagaaagctattcttaaatgatttggaagacactgttgtctctctttttttttttttttttttttttgaggcggagtcttgctatgtacagtggtgcagtcttggctcactgcaaactccccctcccgggttcaagttctcctgcctcagcctcctgagtagcagggattacaggcacctgactaatttttatatttttagcagagagaaggtttcaccatgttgtccaggctggtctggaactcctgacctcaagtgatctgcccaccttggcctcccaaaatgctgggattacaggcatgagccaccatgcccagcagacactgctctctttgaaggcatcttagaaagtgtcctaggcccatagacacatataagcctactgttaagatggcagagaggcagagtaatggaagagtctgtagacttggtattggaacagccagttaaattcctttactttgcttattgcagcttggtgacctgattccacataccacctaactttctcagtttagttttcctagtttgaaaaatgaaagtgccttgtaaactaatgtgttacacaaatgtctgcattatttacttttaccattgctaatcataaattttttaatcttgattttattagttttacttttgactttattcccttttaagatagtctggttactgggagccacagttagaatgactcacccagtaattccctagtctttaagccaaaaccatttcctatatatggagttctggcatttttgcaaatgtgctttatggtacccttgaggatggtctctggatgtttcccgatttcaaacttgtatgaaagattagaccagggaatttctttgtgtagaaattttctcatagttgtcttaagttttaactcatgtacattaatctttagctttgctttacatttgttttctgttgatagccaagtcattgcttgttaaatattccttagaaatgaactttcctatcaatttaaaattattttagctgtatctgtggcacttttttttttttctcttttgagatggagtctcgctctgttgcccaggctggagtgcagtggtgtggtcttggctcactgcaacctccacttcccgggttcaagccattctcctgcctcagcctcccgagtggctgggattagagacgcctgccaccacacctggctaatattttgtatttttagtagagaggggtttcatcatgttggccaggctggtctcgaactcctgacctcaggtgatcgcccaccttagcctcccaaagtgctgggattataggtgtgagccgccgcacccagcctgtggtaccttttaaaaagtaaaaaattcaatggcgtgaaacaacagaaggagttctgcttccatttctagttgttaaacgcctttctctagccaagatcacatatatttctggttttttatagctagtgcactataactctgacagtcatggttagattgatagttttactgaaagtaatttatcaaaatccccattagattgtcttttaatgtcaacatattaaacctgttccctgagagatactttcctatttgttctccttgccctttaaatatcatttggtgccagtgagatgaagaatagaaaatgtatatcttttaggggaacttcgcaagcctgagatcccccactacatatagtcattcagaaaatgtttcttaagcacttactacctactttttctcagacattgtaccgggacatatagattaaaagaaagagtctttagtctcaaggattttacagtctaatggggaagcagatgtgtacaaatataaatgatgcaatacagaaattattgtggcatggtatacagggagaaatgaaagcattgaagaaggcaaagaagtcttcctcgggaagtcatggcttcaaagagaaaagtaggctgtgtcttaaaggataagtatgactttgccaagctaatttagggaactttgtattctaggaagagggaacagaatgtgcaaagcctcgaaggtgcactgttttgtgtgtgtgtgtgtgcgtgtggggattctttagtatattttgactgcatgttgaggagtgatgaggagtagagtttgacaggtagtcaggatactgtaaggttaaaacctgagctctgtggttgacttgcttcgtggcattgagattttgaatatgcactgtgctttagacttcctgttgtgtaagaagcccatagtattgtaggtccacctgctattcacatggggttataaatattgcaggcatgaaacgcttcctgatcgctgaatagtaagaaaggtctgagcatggtgccgattaaattctccattgaaatgtacctttgtgggtacattaaattattttagcataagtctagtgaagtgccagcagtagatactatgttatttctggagctcttgatgttgatttttgaggctgaacatgctcttagcctcaagcaggtcatatttggaatacctgatgtgtgctcctggttgctcagtgcttaggatgcataaacaggtagctgcagtctcatctctcagtatatatacttttcagcaaatcttttttttctagataaattggaaaactaccttttttctgcatttttcatctgatgtcattatggtatgtaggtggcagctttcttgggcacagttgtctatataactgttcatcacatgagtcattgtctgtttctgttcttctgcctgaaaattccatcttggaaatcgtgtcatgcaatcggtgactgcgacattctacttgttatgtacactgccactggctttgtatgttatgttgatggactctacctgtgctacagtgaagggataaagtgacttattaaattgagtcagactcagttcctccaaatggtatttcctgtaaaaatgatgccaagcaagattctgcataaaacatgcatatgctttacactgtaagcatacagtgcctaccttttgttattgtgtctgcttaaatccttaccacagttgtactcctgtttgatcaagtggccagtttaactagatactagctttgaagaagttctgtattggcccctggaatgtgacagttcataccacattgaaaaggtaagaaccaagtctttgtagagtagaacaccttaaagttaatccacttttaccaaattcctctattgttaaagcaacagtcctatattggctaatttttaaaatcataatgtgccacactttacacatccctagaatgtaagctagggggcaggggcctatgcctgttttgttcactgtagtgttcccagcacctagaacagtgcttggcacagaccaggctctcagtaaatatttgtttgaatgcatgaattgattttatcatctgtaaatgttttgtttcatattagaagagaccttttctaggttatctgaataattgttttaattcttaggaaagctattaattttctgaaaaataagttttaaaatatgtttggaaggccctatgtcagtcaaggaccagtcagaggaacagaagccactgttggtcttataagcagagggaatttaaaatagggagtaggttacaaggctgctagaagagccaagaagctgaacaggggctggtgaggcacccattcgattagcaatgcctgggaactactatgcctgcaaggaaaatagtgcactggtgtcaccaagggctggaagtccgagtggtctggtgtgagcggaagcatggaaagaggagcagtctggtggcagctggaagtaggccgagtgagagagcgtattaccctggctgctccctgctcctgcctcttatcctcctcagtgcctcccattgatggaacttatcctgaaatcagttggcaaagggagcctgggagatgtagttccctgtgatcaagcggagcaagggagggatcccagcgcaaacaggcaaagacacaaaggcactgaattctccaagatgtaatttctttccccttatagtatttgaattattttggacaagagaacggaagggttttccggcagatataacattgcgtgcttctaaaggatcttgactgttgctgaaacaattattagtcccaggaagtaatgtaacaactcagtcatagtttatatacttagggggtatgactaggcaaattggctcctgtattgaatatgtatttgactgttggctgctgccaggagcaacttatcgtttggttactcagaaaataagttcccaccctgtcaattctgggaagtcttaggtatggtgtatccacattgagtatatctacaactggacagcttgagttagtcacacagaagccatacacagaaaatgttgaggattgcagcgttaaaacatggtacagctcactcttttttttttctttcgtttttctggagacagagtcttgctctgttgcccaggctggagtgctttgatgcgatctcagctcactgcctcctctggctcccgggttcaagtgattctcatgcctcagccttccaagtagctgggattataggtgtgtacctccatgcccagctaattatttgtatttttagtagacacagggtctcaccacattggccaggctggtctcaaactcctggcctcaagtgagctacctaccctccttggcctcccaaagtgctgggattgcagatgtgagccaccaaggccgggcctcagctcagtgttttctttacagttaaggtaactgcagtgtggctgttttatcttgtgctgcatgttagtttaactagtcttattgatttgtttgttttaccccacaacttcagataagtttgcactgggtgagggaggcaagatcactgggtctgttttcttctaccctgacctgaaaaaaatattttgtcttgtaaggaatgttgctgctgctccatttaagggcagagctttccaagttgtggctacttgttttctacgtgattataaaagtgtctaatgagttatatgagacaagttcagccctttctagaagtgctttttttgtcaatcaggtcacctgcatttgggcccttgctatattaatggaattggtggaactaggccagcagagttttcagtgcagtgtgagtatgtttgcttttaggctgttacttcccacagaggccacagataaaggactctcgttgtttgagtgaagttaccaactgtaacaattgcataggtttccttgtttctttcttttctccaaaaaactcatttcctcttggcaggtgttactataattcacaggtgtaatgaaaatgtaatttgggatttgaaaaagcatatcagactgcttcccagagtaccagttcttttcagctggtccatttcaacttaagaggtccatctatgcatttttgaagcttcatatttaataaatataatatttcactgctgtgtttgactattccgtttcccacactttctccttccctaccccactcttctggatcctgtgtttccccacaggctttgtgaatgccggtccactgatggctgaactgcaggtctctccccagtggaaagccccagagatgagccagatctgcctcagctgtggccatccgtcagcgtaaggttgctctggtggtcgtcttcagtttgtccagctcttccccttatcccccatcctccctcatgtgtggctgaagcttgccctggaatcccacctttgtagcatgtcactcggtagtagtagaattttattattgttgctttttttcattttcaattaatgttaagtgattctctgacaaattttgttgaccatagccctcttttcccctcagttcatagatttcctataggaattctggtttgcttttaaatacatatagaatacagtttatttaagttctggatttcataagcttacttggaaaatacttttttaaaaaaaacatttcaggtcaaagcttccaaaaagaaatttcttaatctgaaacaatgagaactgggttcctcaggcctcatgtcatttcccctcacccacaaatcaaatgtgtaatgctctcattttatgatgtattgaaacagtgaagcaaatgcgagagggagagagacctactctcagctgtagctgataagtgtgtcctagcatggtgatttgagcaaatagagcaccttttcttttccttttcttcaaatagccatgctgtcttttgcagcagttgctggtgacggaataccataaatccccaggcctctaccacagagcttacatctttagatgtgggtttacatgttaatcctacaatgttatttcacctcagtggtctgaagtgcgcacacagtacattttgttctttaacttcctcttttcttgtctaactggaagtccccaaatgtgtggatttagaaatgagttctctagtgtttctagttttgagttaaggaagttttgtcttgatattgtttaggtggttgtttttgttctgtgccttcaaaaataatttcttacagaattttctgtgtgaactggtgacatcatatgctgtagtgtaaagcttgtagagaagggggcattggtgtctttttgttgttgttgacactttatcactccttataactgacacaaaccctgagaagagaaacaggaaggaaactccctgttcttaccatgatgcttttgttcaaaatagctgaaaacagcagagctgacggaaaccaatttgagtgtgacagctgatttgagaaagaatgaattaagagattcaggctcttctgctatgttgaaatcatttttactgaaagattagctgtttggaacagggattgactttgtctctctgaaagtaggcatgaagagttcggttagaggaaccgttacagatggaggagaaacttgaggaaaggtctttcctgtagtgtgactacagtattaacattcccagattatatgaaagagaaaggaagcttcattaaatgaaacattggaatcaggaagactccggcttggctccctgagcattctaacttgttctgagcctagtctcgacagaagtagcctgacacaagtggctcagatcaagggtccatattacgggcagagtaaaaataggtcccagtttcattagacttctcatacatttaaggaaaaaaagatttgttgccataggaacagaccagttgttttctgtcttgtgggattttaggagctggggagataggaggatccctgtgcttataatctaaacatcagtaaatgctggttttttttaaaacaacaacaactttatcttttatgattctgaaacctatccacgataaaaatcattggaaagtatgaaaaatataatgatgctgaaggtatttttcataattcttttttttttttttttttggagacaaggtctctcgctccgtcgcccaagctggagtacagtggcacgatctcagctcactgcagcctctatcaggcttaagcagttcttctgtctcagccttcatagtagctgggactacaggtgcacaccaccacgtccagctaatttttgtatttttagtacagacagggttttgccatgttgcccaggctagtctcgaactcctgagctcacatcatctgcctgcctcggcctgccggagtgccaggattacaggcatcaaccaccatgcccagccttatttttcataattcttatcacccatttacttgagcttataccataatgattttatatcattcttttttgcttaacatttattataagcttatttcatgacattaaaaacgtgtaaatacctttattgtatcccagcattggaatatgtcattattatctcttgcccaattgttaatatttgaattttcaattttttaacaatacaaataaggaagtataaatttttgtgttgttgttagagtgatgggttatttatgtgttcagatttgagtagtcaagtgggccctctaatttaaaaagttaccaaggggattctctgggttgagcccacgtagagatggctttgctatgggcattatcattctgaactgcttcattgcagtagatgtctgctgaggcaaggaatggggaattcgggagaaccctggtttccccataagggacctaaggaacataagggacataaggaacagctttatgggtcataccacagcaagatgggccggcactttcacattgagaggtgacagcgtgctggcagccctcacagccctcgctcgctctcggtgcctcctcggccttggcacccactctggccgcacttgaggagcccttcagcccactgctgcactgtgggagccccttcctgggctggccgaggccggagctggctccctcggcttgcggggaggtgtggagggagccagctccgggaaccggggctgtgtgccgcacttgtgggccagctggagttccgggtgggcatgggcttggcgggccccgcacttggagcagccggccagccctgctggccctgggcaatgaggggcttagcacctgggccagcggctgcagagggtgtgctgggtcccccagcagtgccggcccaccggcgctgcgctggatttctcaccgggccttagctgccttcccacggggcagggctcgggacctgcagcccgccatgcctgagcctccccccgcctctgtgggctcctgtgcagcctgagcctccccaacgagaccgccccctgctccacggcacccggtcccatcaaccacccaagggctgaggtgtgtgggcgcacagcgcgggactggcgggcagctccacctgcagccccagtgcgagatccactggatgaagccagctgggctcctgagtctggtggggccttggagaacctttatgtctagctcagggattgtaaatacaccagtcggcactctgtatctagctcaaggtttgtaaacacaccaatcagcaccctgtgtctagctcagggtttgtgaatgcaccaatcgacactctgtatctagctactctggtggggacttggagaacctttgtgtggacactctgtatctagctactcttggtggggatttggagaacctttgtgtccacactctgtatctagctaatctggtggggatgtggagaacctttgtgtctagctcagggattgtaaacgcaccaatcagcaccctgtcaaaacagaccgctccgctctaccaatcagcaggatgtgattggatggggccagataagagaataaaagcaggctgcccgagccagcagtggcagcctgttcgggtcctcttccacagtgtggaaactttgttcttttgctctttgcaataaatcttactgctactcactctttgggtccacactgcctttatgagctgcaacactcaccgcgaaggtctgcagcttcactcctgaagccagcgagaccacgaacccaccgggaggaacgaacaattccagacgcgctgccttaagagctttaacactcaccgcgagggtccacagcttcactcctgagccagcgagaccacgaaccccaccagaaggaagaaactccgaacacatccgaacatcagaaggaacaaactccggacacgccgcctttaagaactgtaacactcactgcgagggtccacggcttcattcttgaagtcagtgaaaccaagaacccaccaattccggacacaacattatatacctgatgtgcggaaatacccttgcgccattgactagcatcttatgttgttcatacagtcctcattcacttaaacttagtcctctaaggaggtggattagaggtcctacattagtagaaaggaggtaacagctactgcattattatttttttttgaagaagggccctcagactggagatgaggacagggactgtgttttcatgtctatctgcatacttaatgcacggtgtctggcacatagtgtctatgtccctattatgagcagcattattctgttaatgtgtgttcaggtcatatgctttgttttgttttttgatagtcttcctcatactgttagcccagatagctgaagatctgtgacaccaggaagctgagcaggtgaatctcatggttgctttgtggtaattgcttctttgtgccatttcatttctgtgcttctgccacctgtgctgctttggaagctggagctagacatgaagcgaatcctctgccctctcagtaggaggttttggtgtgacacatcatcctggggaaaaatgtagcatgaagtgtgaaacaggaggctgaaatagcagtcctttagcccttttgtgggatgggagtaaatatttagacgtggttctcaggtgctgtagaatttaataaccttgcagcagttttagaaactccttgtgcccactggaacaggttcgtttaaagaatcttacttgggctcttttgaaattgtgatgcccccacctccacccactcccctcccccgcccacccccagacctgccctgagttcatctgcctaatgttccctttgcaggatctttgtactcacatggctggtatctttgccccacccccttgtgccatatattttgacctcattgtgttctattctgaaacgcctgggttttgaaacatcgtggtgaatgttttctttttcaaagggcaaatctccatcttttgctctcctcccttaagccagggctgttttgatgactgatattctgcacaccactggactaaccaaccatctgtactttgatcccagaattcattttgattctgctgtttgtttagaactgaaagctttctagcttgtttggatgtggttgtgattcagtgaaactggcactgattttccatctgtttgccattggttgggacttctccaatgtgttaggaaagctgctgtgctgagttgcgaagagaaattcacatgtccatggtcttgcacaagggctcatttgctcacttagaaggttttatgtagagcctctgcctgggtgaaagacatgagcttccctggaaacaattgaaaaacatcttctgcctggccactcagtcttgagctctagtaggttacactgtttttcccttctgggcttctttttgaggaaggggagtgtggatgggaagaaatcttcacaatcagtctcagattcccagcagcagagagtgaattgtatgttgtaataataaaaaaaagaatacctaaagaacaagatatcaatttagtgaccattattgagcatttactatgtataacacacatttgggtgtgtaaaggtgattctaatttcagtccagctgatcctttcttctgtgaacttgggcaaatgacttgacctctctaggccttagtttctccaactgtgcttagactagatcattcctaaggtttgttacaattttagaattttgtactctaaacgtgtatctgtttgttacagaacaagagaggcttttccacaaaattgacatattcttatgtctcacttcaaactaaatggcttaaaaatggttcctctagagcaggatttctcaacctcagactattgacattttgggtgattccttgttgtgggcactgtccagggcattttagaatgtttaggagccagcattcctgtcctctgcccactagatgccagtagctcttccctacccctctgcccgttgtgacaaccaaaaatgtctctagacatcagcattgccccttgaggggaaatcgtttctgttgggagccattggtctagaggaacaaagatgggactatttgaatatgggctgtttttaatatcagttttcatgttgttccactattgcttattacctgtttaatcagtaagcatgcattaagtgtatactatacacagatgaatgccgacgcttgattatgagggactttaatgaccatgtcaagttttcaaatgttgagtccacctggccaactttgaaatgattgcccagctgttagcgcagcagtccctacacgcctacacccaccagcctgctattagccttggtcagggtaatgattgaaatgtatgaaagcattcactcacaaaggctatcagatagcaacctaggaaggccctgggattgtgagttatggatcgggactgggtcttgtgcatccagaatctagtattatgatagttatcccttcagcttcctaggggaaaaaaattcctcgtcaaagtggtggggtgaggaatctatcctagggatggaggatgaagagcaatctcattggacaatgaccatatcaccctttttagtagcttcttctaaacataggccctttccctcccgcagtgggcaggctcactttgcagctttagttttttgttttgttttgttttgtttttgtttttaaatatatgagtagatactggttgttgcaaagaggaagttaaactgaagtaacctaaaaatgtaaagaactgaatgtccccaggagatgaagacagtaacttgagaaccaagtttgcttatattacctgaagtgaggtcactaggaaattggtttaattatagtatcaagttttgaaatatcaggtccacctggctgactttgaaatgatttgcccagctattagctcagcagtccctccctgcacaccaactccacccagcctattgttagccattgaagtggtgattgaaatgcattagattgcccaagaaatctaatctttggacttgctacatttgctataaaatatcagtttaggtttaataactttgaatttgctcccagtacccccagattttctcatctgttttaaattcacattctgcacttggtcgggtgcagaatggtgcttctcgctgattggggtagagtgtgttctgtgagcatctttgctgggatgctctgggattccaaagccatgattcagacacttaagcctgtgtcagtccctatccttaggtcctggcaggctccgtgttccattccagctgagcctttgctggagtaattacccacatggagtcttcaagccaaacaattgtttgtactgagatagtctcactgtttggctcctaatgaaataatctctttcctgccctcaatgaaagcagctattttttgtgtcctccctcccctattcagagaagccatgtctcatccaccactcttccagcttattcataaatgctttaagcagggtctttgtgtaaaggaaattggctggagctgaaatatcataggctaaccaggagacaaggagcattaaggacacccttttccttgactttctatttagggtatttaaattacctttctgtgattttctgtaataagcaatctaaaacttaaatccacataagcaaaatagtcatactaggtttttaaaaagtatactaaattaggccgggctcagtggctcatgcctgtaatcgcagcacgttgggaggccgaggcaggtgcatcactaggtcaggagatcgagaccatcctgactaacatggtgaaaccccgctgtctctactaaagacacaaaaaattagccaggcgtggtggcatgcacctgtagtcccaggtattcgggaagctgaggcaggggaatagcttgaacccgggaggcggaggttgcagtgagccaagatcacaccactgcactccagcctgggtgacagagcgtgaatccatttcaaaaaaaaaaaaaagtatactaaattagtataattttattgttgttgttacctaaaggagctctcaaaaataaaagctggccaggcgtggtagcacatgcctgtagtcccagctactcaagaagctgaggtgggaggattgcttgagcataggagattgaggctgcactgcactctagcttgggcaacaaagcaacaaaccctatcttagaagaacaaacaaaaaacccaacaacagaacaaccacaaatgagtgagtgcagcaggagaggcagcagagcgccgtgggagttggaataggaaggagaaaaggcttcatggggaaagtgggcagagcaagatttgcacaaaaagatgttttgcaaatagaggaaataggccctgtaaagctatttgtgagagactgtaagttgatcaacaaagtgtaagtagttcttctaacttttttttttttttttttttgtgacagagtcttgctctgtcgcccaggctggagtacagtggctcaatcttggctcactgcaacctccacctcccaggttcaagcgattcccctgcctcagcctcctgaatagttagtattacaggcgtgagccacaatgcctggctaatttttgtatttttagtagagatggggtttcagcatgttggccaggctggtcttgaacccctgacctcaggtgatccaccggccttagcatcccaaagtgctgggattaaggcgtgaggcaccgcgcccggccacttctaacctttttaaggagtatttgcgtgaacagaatcaatgagtttcttcaaattaacttctgacaataatctaaatggtctccattttctgattcacccttttttccaattccaagttgccattatccatgtaattggctctaaagagagcaaggaaatctatcttctccaggagtttcagtcatagatttttagctggctctctttatcatttgcaactgagttcattcatatgcttgttttcaagaattttttcctttagttccagaactctttgcttccatcctatggtttcttgggaggacagttctaagctttcttaagataagtgtttcaatcacaccatctaccatttccctcagaagttgttctcctcttatgcggtgtgtttaggtgtttggggcgccaatcactagggattggaaggattttgatgaatcttcaagtaaccatgtcttgaaggttagccatcatcagttcactccatgaaatgaaaacttacggggatccacttttgctcttttttgaagaagtctattgtcctcaaaggaagaggtggacctgttcagatttttaagttttatcttattcagtgtttgtagcatcaagggactggcctctaacggaagcaactgggggcttcattggcttatgcaatcagtctcatctcactgactttacaaggttcttcaatactggcagaaaatctcttggctagctctttctccctccttaaaatatgttggctctttactataaaaacaatcatagcagcacataccagaatctcctagggaaacccccaaagacttgggccttgtctcagctctcagacattaccaccaagagcactgcatagctttcccaggaccaactggaaagaattcttttttacgacgatgtaattgacaatgaaaattgtatatgtttacagtatacaatgtggtgttttgatatatgtgtacattgatttttgtggcagtcaggaggtcctctagttggaacagagactcaccacacccaagagtccctctgtctgtatcccatccccaaatcagaaaaaggcctgtgcgtctctgtgggtagtattcactctctcagattcctctgtgagtcaggaacatgacaagtggcatctatatacacagttttaagaggaagtgatgtcactcttggtgtatagaagtgagaagaggagtaatgagaattaaagacccagatcacaggagaatttaagccatacttagaagtttggagttcagttgatggtggggggtccagtgacatagctttgaatggggtgatgacattatcaggacatatgttggcagaatgtccttttcaaagccaacaaagtccaaactaggatctcattctttccctcctgaagtcacctggggaattgaattgataataatgatacaggatgactgattgatagttctttattcccagaaacatcacctaagtatacactagttaccttccactgctgggagagacaacaaggaagagtcacagtaagtccctacctgttaataataaaccaatggccaggcccagtggctcatgcctgtaatcccagtactttgggaggccaaggtgggaagatcacttgagcccaagagttcaaaaccagcctgggcaacatagcaagacctcacctctacaaaataataataataataataataaaacagggcagtaagattaatgtggagccaaatttactaaaagttaattgccttcaacctttccagagtagtttaatgaatttttgagatacagttactatcttttagaagagatatgtttgagataatctggttaaggtatattgacttgtctaaagtcacacaggaaattagtgctgtaatttagataattcgtatctttagctgtgtagataagaagggccagttaaataacatgagaaagatgaagaatgcctccttcctttctcctagtagacctcagtctgctttcctgttgatttctttgtgttacaggctttaatgttttttgagaaaagccattttaagttaactgctgaattagttttagacatagattgactaatcatttcattagtgagtacttagcagtgttctacctcccttaacctcctttttccggttacctggtaggaagataatgttgctttgcttcatctccattggtaatcacagcagtctgtctaattgctatgtctgttctatcattgagctcctggattaaattggttcagcgggcttgtattttggttgagtatataagtggctgctttcttctgctagaatctccaaacctccatctttatctttcatactttgatatattatataagtatggggggagtaaaaagcagcaccaggatatcaaaatggtaggaagagagattaatgggactccgtataaggaaggcctctctaatagtgggtgccgtctaatagacaaaccaactaccttttgaaatggtacgtaactgactcagcattggacaagccaggtgatcacccctagaaggagggtgcattcagtgagaggctggacctaagaggatttctaaagtcctttccacctctgattttctaattttaaatttcttggtgtaggatttacctttattctctaaccagtctcagacatgttttaattttctttgtctcagacatttttaagcttaacttatgctcttttttcaacagtacaaatgtggacagtgtttctttttgacaaacggaaacaacattcttgcaagatggcccagatggaaagggacttgtcttgcaagtgttctgaaagcagaggttgattgcataagcctttattttggtctcatggttccttaaaatgtttgtacttacagaagttcaaagttactgtttattgttattttggaataaggaacttgatgaactctcttttgtgtggatgaaaacatagaggtaaacatacctctcagcagccctacacaatttttccaagatcccactggtgtttctgtgtattcttccttttcagtgaatcagagaatggagggatataatgagtggaactgaggtaactggcactagatttgttcttaaaacaaatactgctgctttttttactttgacttccaaattttgggtcagagttaatgacaagttatgtcacgtagaattaatctcttataaaatctgagtttgttgatttaggtttttccttatatgtatgttgcatttaaccagttttcagtgcctggtataggctccatgaaccaaatttgattccgtgttttaggttcctcaagacctaacatcttcatagattgtttgtttcattttacattttcagaaccattgaacggtaagcaggaagggacctaaaaattactgcaaatcatctactgtagtagtaggactgtagtagtagaaagaactgtagggctcattgttcacccaattcaccacatggggatcatttctctaccatccctgagaactgattaccaaacctctgtttgaacactgcactaactgagattttacaatttctggatatgctgcattggtttttacacaaccttaattgttagaaaatttttctctagagtgtgctaaaatcaacttctactccttggtgccagttctgcttttgaagcctttccaaagtaacctaatccgttttctgtgttacagctatcctttaaggcatttgaaaacttctcccttcattttgcaaaacaggaaaaatatatacatttatgttgcttattgacgaattcatttaacacacatttattgtgtaccatcttctgtttgctagcattgtgtcaagtgtttgtgataaatgatgaaggaacatggtcattgccttccagagctcatagtctatttaggacaagagagacctgtaagcaactcgaacaagatattaagtattagaagaacaaagcataccctgggctattagcaatagagaaagttagggtttattccattggagggcatcacagatgaactggatttttaagtttgtcaagcagggaatgagggagaaagccattccaggtagaaagaatggtgtagtcaaagagatttgagtgtgctgcatatttcacaattatgacttcctcagcatgtgtaaagtacaaggctctcaacagactttatatattatgttaaggagtttcaacttaccctgcagccagtaaggagccctggatgcttacgttgttttgtttttacgatatctgtactggtttttcccattgcaaaattaatagaaagctcattgcaaacaattcagagaggatatatagagaagaaaatagatgtttcattatcccattatcccgatatagtaataatttacatatagtcttctagattttttttctgtgcatacgcgtacatttatttatttatttattttttgacaaggtctcactctgttccctaggatgaagtgccatggtgcaatcatagctcattgcagcctttgaatccttgggctcaagcagtactcccgcctcagcctcccaagtagctaggactacagaggcatatcaccacaccgagctcatttattcatattttaaaaaaaatggaattgtttcatgtgtactcttttaatactggatttttaaaattactatatcatggagatacttttatatgaaatagaggctccaaaatttttccccgttaaatggtgataccataattccttaatgtaacctattaatgtttctaattttcataaagatgtaataatgaacattcttaacgtatttctttgtgtacttgacctgttttttccctgatgaattcttacaagtggggtcaaaggatttacttagttcttttgtttttttgagatagggtgtcaatatgttgcccaggctggcctcaaactcctgggctcaagtgatcctccaacctcagcctcctgaatagctgggactacagacatgtgccactgcacctagaatacttagttttaattaatctttaagcaaatgttgcttccctgctatgttcaaggaaccatgctatgccgtgagtatatgatagtgaatgttacaggtctggtgacagctcttgtggcacacatagttaagcgggaaagacatcttaaacaatcaaataattagatagtaacaaaatatggtatgatttagaaaaagtaaagggtggccaggcacagtggctcactcctgtaatctcagtgctttgggaggccaaagtaggaaaatcacttgaggccaggagttcaagaccagcctgagcaacatagtgagaccctgtctcttttttatttcattgatttatttttatttttatttttttcagacagagccttgctctgttacccaggctggagtgcagtggtgggatctcggcccactgcaacctccgcctcctgggctcacgtgattctcctgccttagcctcccaagtagctgggactacaggcatgtgccactacgtgtggctatttttttttttatttttttttttttatttttagtagagatggggtttcaccatgttggccaggcttgtctcaaactcctgacctcaggtcatctgtccacctctgcctcccaaagtgttgggattacaggcgtgagccaccgtgcctggcccatttcttttttttttcttttctttctttctcttttttttttttcctgactcttaacaccactcaatgacccatctttacaaaaataaaaaattcagctgagcgtggtggctcatgcatctagtcccagctacttgggagactgaggtgggaggattgcctgagcctgaaagcccaaggctgctgtgagctatgatcgcaccactgcactccagcctgggtgagagagtaagaccctgtctcaaaaaaaaaaaaagaaaagaaaagaaagagtgaaaaaaagagtaaagggtaaatgaaagttcataacctttaaaaaaaaagtccttatcttttagagatatatgctgaagtatatacagatgaaatggtatgatatttaggatttgcttcagaataatccaggttggagttgaggggcagtgggtgggagtatagctgaaacaaaattggctaggagttgataattgctgaagctcatggttaattatgctctgctttcgtttgtttgaaattttctgtaaggtaaaaaccaaaagaaagggtagaagagatgttacagtcgggtttagactggggagccaaggaaagactcctttgaggaagaaacatttcagctgagacccttgtgatgtataggagttggccaggctgcaagtggcatttggcagttagggaaagagtttttttaggcagcaggagcagcatgtacaaagtccagcaagccctgaggaaggaacatgttggtcccttgaggaaatgaaagaaggctgctaccataggaattgagaggctgcggaaggaggcatgggctagacctttaagaccttggaaactatgttaaggattttgttatttaatccaatagtaatagaagaattttaagcagcacaatgtggctttgcttctttaagagctcaagttggctgtttggtggagaatggttttggtttgggctcaagggagaagagaatgtaaaagtggagagagagctattaggaggttattgcagtggtccgaaagagtctggtggctttagattacagaaatagtgatacagatggagagaagagatactgatttgacagatatttttgtcttggtgatgtgggggctgaaggagagaggtttcatgatgcataattttctgactgacgcaatggaatggatggaggtgtagttgactaagatgaagaaaaaaggaagagattttgtagcaagagattgagagcttagtttggaatatgctattcagaaaatgtgcaccaatttacatatttacctttgtgtatgagactacatggaaggtttatatttagaggtgtgatctgtacagatttgtgttttagaaagattattctggtgggattctggagactaattgcttgttagtctgtgagctttttgaattgaggaatctcatccttattttctctgcctttgtatccccagtacttagcaggcaaattgcttggcacataggtacacaataaataatgttaagagaaccaatgctggttgggcgcggtggctcacacctgtaatcccagcactctgggaggccgagaagggcggatcactaggtcaggagatcgagaccatcctggctaccaaggtgaaaccccgtctctactaaaaatacaaaaacaaaattagccgggcgtgatcgcgggcgcctgtagtctcagctactcgggaggctgaggcaggagaatggcgtgaacccgggaggcggaacttgcagtgagccgagatcgcgccactgcactccagcctgggtgacagagcgagattccgtctcaaaacaaacaaacacacacaaaaaagaacgaatgcttataggtgagacatgaggtctaggtagaaatggatagattctggaaaagtttccaagatagattccacaggatttggatggaagatgggaaagttctctcccttcgcgtagcctgcccgttgaactttttgacaggtccgttatgccagcaggtctaaatataggtagccatcaatttatcaatgttttttcctcctcaatatttatttgtttggaactccatagattagaactcaatgatataattattataatattagtagtagcttgaagtcctccatcacgctagttccccttttctgtctgctgagttgtcaatcccagagcccctctaatcctggcagctttggtggtgggggaagtttcagcagcaagaggaatttgcagcagtagttactccgtatgtagaagctgtccagatgttgaatataagttggatattacgtatatgcttttcattttacaaatggagacataagccctagagaaacttgtcaaaatacatgcaacaggtccgtgtaaacccagatttttccgatactgaactggtacttaggacagttgatttcttgactgatcaaccaaatccatctccatctacttttttcattttccctgatcccttattgcagagtgattctatgttagttttagtattgcttgatgctgcccacgcctgctcttaggctcctgttgaatatgtgcacttatgtgtgaccttgttcttgtgttgtgccgatcactaccagtttacatcacttgtctatcctctttgctttcaaaattgtttggcatattgcctctcagcatttcttttcattttaaatttcaaaatggcatcttttatatttttttccttgattgccatgaccaatgtgtattaaacaattggtttatctctttttattgatacataatagatgtacatgttttcagggtacaagtgatattttgatacattcacataatgtgtaataaccaaatcatgataatgctatatccgtcaccttagacatttatcttttctttatgctgggaatatttgaattattctcttctacctattttgagatatatggtagattattatttactatagtcactgtactgatttattgaacactagatcttatttcttctaactgtatttttgtatttttgttttttttttgagacaaggtctcgctgtcatctaggctggagtgcagtggtgtgatctcggctcattgcaacctctgactcctggattcaagcaattctcctgcctcagcctccccagtagctgggattacaggcacgtgccaccatgcctggctaattttttgtatttttagtagagatggggtttcaccgtgttggccaggctgactaactgtatttttgtacccattaatcaacctcatttcttcctccatccgcctacccttcctggcttctagaacaccgatttactctctcttcatgagatccactattttttaactcactaacatttgcagcaacatggatggaattggaggtcattatgttaagtgaaacaattggtttcacttgcatttttgcaagtttaccagattaaagtaggctggccttatagcagcaataccaggtactgtggaatccaagtacccaccacttaggttgacagccttgggccttctttctttgcctgtgtagtgggggcatatgcaagcacaagggcagggtgggggtgtgtagcagagaaagggaacaggtgagggtttaaaaagtgcattttcaagaaatattttaagagaaataaaggaagctgcttaaattttcatgttgcctagaagactttgaaattgggtctagggtaaatttcttctctctgtattcagttcattttggttctgatattttaggaccagaactcatattcctttttaaaaaagaagcactctggctgagcgcggtggctcacgcctgtaatcccaggcctttgagaggccaaggcgggtagatcaccagaggtctggagtttgagaccagcctggccaacaaggcgaaaccccgtctctactaaaatacaaaaattagtggggtgtggtagcacgcgcctatagtcccagctactcgggaagctgaggcaggagagttgcttgcacctaggagacggaggttgcagtgagccaaaatcacgccgctgcactccagcctggacgacagagcgagactctgtctcaaaaaaataaaataaaaagaagcactccgtggtgttgcatagagtgttggtatatattacatatatgaatgagttaactggcccttatcaggaagatggatgggaagtgggttctggaaaccttattctataccacatccttatatatagtcctcagttattgtccctctgtgttctagggcactgtgaggtgaatgctattgtacacgttttatagatgaggaaactaaggctcaggaaatgtaagtatctctcagaaggtcacacaggtaatcactgaaggagctgtgctcaaacctaagtcctacaactggcagagtgtggttgctcccacctgtaatcccagtgctttgggaggctgaggcgagaggattccttgaggccaggagttcacaaccagcctaagcaacatagggagaccttgtctttaaaaaaattaaaaaattagctgggcatggtgttgcatgcctgtagtcccagctacatgggaggctgaggtgggagaatcgcttgaggcgaggagtttgaggttacagtgaaccatgatcttgcctctgcattccagcctgggcaacagagtgagagaccctgtctgtaaagaataaaatgaaataaaagtaactacaccatttccccatgttttcagccatataagtaacatttgtctcttttatttttcttttctctaatttcagaatattttatggaacatgtagttattcactaataaatctagtggctcaaaactaaaagagattgagtatctgggatataactatcactatattcactgggaaaaggtttcacaagggatgtcaggtagggatttggtggggagaagaggctgttctttggcttttcatgaaaatacagttgcctgtatttctgtactgaggccttgtcagtggcttcagagtcaccccaaggctccaagtcttagccttgcattcctcagaagcaaaaagactttaagtacgctggagtgggagctgtgacagtggcttagatgattgggaattgccttttcccatcttaaggccaggaagcaaacagtgtaacatttcacagctgacttttaatttttaatgaatgtgtttggcttctgactttgttagcaaacaaatacatcttaacttgtcttatgagttctagactctggaatctagagcaaaggaaaagtgctttaagaaacatgaaatattaacttggtgccattttaaatcttatataacttagatcttattggagttcctttatgaaaactgtaacctaaaatggatataccacatgttaagaaaccccatttacatcagtttagggttttcattttgtgtttgacgtgacactctcccacatgaaacaagtgtgcgaatcatttttgtgtttattagatacatggcggaccaactatgtaaatccatctaggaatgtgaagggactaaatatctttttagaaggtaaatcggagcttgtgatagcaataaggtattgggataaaatttcaggcggagagcaccacctggtggtaataaggagaatgtgagccttctgttgcagtatttgcgatagtaaataagtgatatctttgtcaaaaaattacattcttatttgtaataatcatgaattcaaatttctaaaactaattttctgccacacaattctagcattccttcattaaaactgctgtcaaaaccttcaggctggccaggcacaatggctcacacctgtaatcccagcacttcgggaggccaaagtgggagaattgtttgaggacaggagttcaagaccagcctgggcaacatagtgagacctagtctctacagtaaataaaaatattagccaggcagggtggcacacgcctatagtcccagctactccagaggctgaggcaggaggatcgcttgagcccaggaagacgaggctgcagtgagctatgatcgtgccacagcactccctgtccgggtgacagcgagactgcctctaaaaataaaaattaaaaaattaaaaacctgctagctaaccaaataattgtctgtgtcctaaagaactgaagtcttgtgctcgttgtcgttccaagcgtaggccctgtttatctctgtagaaaatcagtgtcttttcacctctttattgcatcctctaatttttatatcacacttattttatgtggtaaatttctgccaagtgggataatggagaaggaagtatttctgattttttagtaagtttttggcaggtttcatataagtcatttttctttcctgggtaaaaattatgaagaggagtatgataatttttcagagtgattattaggatgagtaacgctggcaggggatgggagattctgtaacagttttgaattaaaattcatatttgagatttcttttttgttgctataagcatctttattatttggcaatcttgaaacaagatacttcagtagttgagtaaagtaggaacatcagcctaaggggaaaagatcctattaagttaatgcgaatgcatattttataggcctggggttggggggaagataaacacagtttcaattacaggttgagccatggacaagcatgccatatctatcttttttcctggtaggaaaaccgaatacaggccaccactaaaaagtggtgaatacaggcccatcaccactaaaacgtctcttgggagaggactgtttatgtaaggtgctcggccaaatagaatatgacatggctttgcactcctgggatttttcttaatataagtaacagtcttataacatctgcgtttcaacactcatattagcagacactgtaaaaaaattgtaccatgcacaaatgcccacttattatataattctttttatattaaatgcccagaattggcaatccatagagataaaaagtagattcatagttgccaggggctgggaggaagagctgggagaaaatgggtagtgcctgctaatgggtttgtgatttcttttggactaatgaaaatgttctggaattagatagtagtaatcattgcacaactatgtgaatatattaaaaaccactgtattgtacacttaaatttaaactaaagaaaagctgacacatggaggaatgagcagagtcaataaacaggtggttatggtaaaaattatttcacttatgttctagcagaaatgtctgataatctaatattgtagtttaggccttgaatgttgtaatttgtactttattgccctgttcctgactttcacagggccgcgatgggcctcttggaacattggtgtgttcatctgcattcgatgtgctggaatccacaggaatctgggggtgcacatatccagggtaaagtcagttaacctcgaccagtggactcaagaacagattcaggtacttagcccaagagtgagtcagctgcttccatatatctatgtaaaaggaattccagatgaatttcagtcaaacctggcataaaggtgaagataaaggaaaatttagttgttaaacacttaacatcagattcttgtaccctaacagaaatttttattctttctatttaagatacaagttattctacctatattttacctccttaaaaacagaaatagtctacggtctaggattccatgggcccacgaaagtattaagagggatctttgggtgattttctaagactcttagcatttgcaggtctaaaatttatagtttcaaatattcacttttggtcgggcacggtggctcatgcctgtaatcccagcactttgtaaggccgaggtgggtggatctcttgagtctaggagttcaagaccagcctgggcaacagagtgagacacctgtctctacaaaataaagaattaaaaaattagctgggcctggtggtacgtacctgtaatcccagcagtttgggaagctgaggtgggaggattgcttgagcccagaagttgaagctgcggttagtcatgatcatgccattgcactctagcctgagcaatagagtgagaccctgtctcaaaaaaataaataaataaaaattcactttttaaaaaaacctccaaatcatagacttatgggaaaattttattactaaaatgcatacatgaatcttttttttaagacagagaaaatattttaatggtacataatattaaaatgtatccatttttgtaaactcatcatttctgatatttttagacacatacaaatgtggaattagataacatttaaaatttcaaaaattttaaataaatttaaacataattaaccttaaaagtatattaaataggacaatgtgtatattagatttattgttatcatctttaaaaagctgtaacagctggaatgcatacatgaatcttgcatgctgttagcttggtgggcttggagtgagactcctaagttaatgagtctggctggcctaagagctgtaccttgatatagcttcattattttttattctcttcctacattgaaacgctttaatttcaattttttctttcttgggagtaaaagggaagccccccgccccccaaatccagttgctaaagttggtaatggaaatcagaggttacgcttaaccagaaaatggctttagaaattgctttagattgtatttatagatgtattaaaggtctaaaaaggtgagttacatttttcagttacacttcactctgttttatgaaggaaattatatgccatggagatagtcgggaatttggagatttaaaaagctcttgggatttatccctcacaagtgttaaggagtctacttaaaagcctaatgggaaacacatttattggaattgattaatagtataaactcagaatgataacactgatcattgcctgccaagtagacattttaattggtagctgtgtatctaagagtttcaaatgagatcttgatttattactgaattgaatgtatcttggtacacaaatatttcagtaaaaggaacctatggagtgggggaaagacagcttggggcaaatgattgggaaatcctagtaaggtagagggaatcatgaattggaaatcagaatacacaagtttaaatgttggttctgacactctctaggttggttcttcaattgtacagtagtggaattgggtgagaagtttttcagttctttcttgatctgacgttccatgtttctacattctctttggtcacagtgcatgcaagagatgggaaatggaaaggcaaaccgactttatgaagcctatcttcctgagacctttcggcgacctcagatagacccgtatcttttctggagcaacttagaaggctgagtggtattttgatgcttggggagagtcagacaagactccagtcctgtaatgtgactgggtcatctctatgtggattagtcagtgtccttgcttgtcctctgtcctgcaatcaaggtgcacaaaaagcacatgtatttgtgaatgtcggaattgtcatacggtgtcacttgaagaagactcactctggaattaagactgcagtgatttcactgtgaattcttctataaagttacatctccactagtttattttggatctctgaaactattgtttgattaaaaagagtagttcattgtgctctgttaaccctggcagtcagcaaaattgccattcatttttatcatctttttatgtcttgggtgaaagaattaactgttgtttaccagtttgtcaataaccaataactttcttccaccatctgttcaacagagcatagcacctaggacacaaaaccaaatcccttaaaggcagtgcttctcaaaatgtagtttgtagatcatcttgttaaggttcttttttttttaatgggttcaggtggaacctgttaaatgcagatttggggccttgcagaagacccactggtcagaatttggcagtggggcacaagagtttatgtttttaaggggcacttacgtgcctttgtttgaggcctattgacctaagtgctttaaaatagacatttgactgctttacctatattctagaacagccacatacagcctctaatgtcagtttgaaggttaattccacttgctgctatcatcacgctgaagggaaagcataggaagtaatgattccctgctttaactgtgaaagaggcattttaaggttttggtcagagaaattgcatatgaagaggcaggagccatgtggggaaaccaggcaagagggaaggaggagaacaatgctccgtggaacacaattgatcttttatcttcttgctgtttgagaggcttgttggattcatccttaataagctttttgcagagctgttgaaggatttattcgagacaaatatgagaagaagaaatacatggaccgaagtctggacatcaatgcctttagggttggttatacatctttcaagttttgtccacaataagtaatgtgcttattaaatcaggccagagaacacgttgaagaactgctaccaaaacactccaaaaccatcttttaaaaaatgcaaaagtagaccaggtgtggtggctcatcccctaatcccatcactttgggaggctgaggtgggaggatcacttgaacctagaagtttaagaccagcctgggcaacaaagaaagacccccatctctacaaaaaatttaaaaattagccaggcatggtggtatacatgcctgtaataaccagctacttgggaggctgaggtgggaggattacgtgagccagggaggttgaggctgcagtgagctgtgattgcaccacttcattccagtctaggcaacggagtttgaccctgtctcaatataaatttttaagcaaaagtaaaaagtgccagttactgagtcaagaccatgaggcagaaacaaacttctgcctatcggtgaattcttgccttaatctgtagttagaaggtgttagtgatgattcccagttttgaattatttcttgggatggacatgttgcatatactagatcaaataaaacagtatatgtgtatatgtactacagctatatctatctacatagatatatacacacatatatacttttttcctgtaaatgaaatcaacaaaagtaggtgtaattaaatcaccagagtttccttcagtttgaccaatgtatatttccagcattacctgctgataaccagtgtgttggactgattgccaatgggacccttgtttctgagaagggtttcagagggagactggctaccagttgccaagaacacattccatcctaggcatgtttagaatctgcaatacagtatatgataactaggacaaatataacacacagggggacagacagcatgatttctgaaagaggaaaatatgcctaactaatgacagctaatggagaaccaatagatatgactatttagacctttaaataacctttgacaagattctacagaaaattctcttaggaataattggctatttatctagtcacagaagtattgagagtaagggattctccacttccagcgcaggtcctacctatctatcatctattctagttatgtaataatgatataatagccagtgaaatcactgtttgcactgagctccaagcccttctgggtaattaaaagttaagctaattggaatccacttcaggctgatcttatgaagctgtgtgaaaggggcattaactggtaggtgaatttcaacacaggcaagtaagtgtaatacatatagttaggtaaaaatgattccttctcaactgtgtatgaaggactcttaccttgcagttatccagaaaagggacttgtcaatatcatatctgtgccaagaaagaacccagtgtgcagctacagcttgcatggcatcatcaaaaacagtttagaacccaagcatacacatttcgttttatttgtagaaaactgtggtctgtctgcccagctctgttcattgtgcctaaagatatgaactcagatgaggtcagaaaagggtatctgagataattcagatgacgaaggagtagagttgctatttgtacacagctattgtggaaacagcagctctgccctcagggtattcatgatttcattgctggtatactgtacccatgaaagcaagcccggttaccggatgtttctcttaggaaggaaataacctcccatttaccaaaaagctatttcagaatttgttatttaatgtacttagatttttttcatattttgtgaagatttttatgccaataattagtatttgctaagtgaagacgtttaatatcaaatgaaaagaaactggctttgttaaaaactattctttttataatggacagataaaacatttttaacttaaatgaaatgtcgtgttaaagacatacactttgtatgaaaaaaacagctgcatgtattgattataaaattattttagagaaaatgaaaattaaagtgaaatatccatacatactctcactatctttgctaataattatcttcttggtgtgttcccctttttttctaaatagtttctttttggaggcataattataatacagttatgtagacttctcatgccttcattccacttaacatatatttctgtgttgcttatatagtgtttataatttttaattgttgcatcatctttcagtgagtagctaaatcactgaaagtaataatttatttaccatttcccttctgtggcataaatgttatttaattttttttagcataaataattctggggtgaacttggtgcatttaacctttttcatattttggactattttcgtaagatacattacaagatatggtatcatctaggtcaaaggatttcaacatttgtctcttcctagttttgccaatatactttccagaatttgtaccattttactctctcttctcagcattgtataagagtactggtttcacttcatccctcccaccattatagaaagatctttctccctgcataaagtgcattttaaattgcattttttatcactggcaagaccaaacatgtttttcatatgtatgctatactctgtattcttaaggttactttgtggttttgttttacatttagatgtttatttgattttaaaacttaatttttgttcttctaatctgtaaacttgaaattaaggtttattttctgactgttaaaaaaatgaatattgagaggacctatgattgaatttatgatatcacaaaggacataagctgagtaagatgaacttattcactagtatactgatatgaggggagacctctcaaagcatgggcaaattaaatttggggcacaggtgggcagcatactggtaaaatgttttagcgtctgtacatagcctcgactgcaaatgtcaacagtcatgagtgggttaggagggcgggcgcctaaggtgtttggaagacgcctcgtacagcattgaggctaatgtggaagaggtcaactctcatgctccacaccaagacaccgccccccaagcttgtcagacacttacgtcagaatcaatagggattggaggtgtccttttcggacacttggaattatgatttatccaactattagtcaccttgggccctgtgttctttgtcttgttaaatcattatagaaagaaaaagatgacaagtggaaaagagggagcgaaccagttccagaaaaaaaattggaacctgttgtttttgagaaggtgaaaatggtaagttgggaagtatttgcactgtatggacagcctcaggtatgtgtatatttgtgaaagggaaagtaggaggtctcgtggtgagtaccattgcaccatcacagctggggctaaagggttctgcatctggattggactgcctgctatcatttctgctctctcgttaccagttgctgcctaaatctgctctgtaagggcttcgctttggggccagatgagaactcaggaaatgcatctgttccatctaagcaagaggcacattccaagccagaatgccaaggctgagggacaccatctgagcagatgctatttccacattagtccttctcttgttagaccttctgtatcccattttctgatttcaatgaagaacagtccagaagtgaggccatattagtccattttaagtgatcccttcttatgttcttgctttgtcatgttgaaacagacacccttctttttccacaggacatattgtgactgtagtagtagaatctctaacataaaaacttggaatcttgggagagaggactttacttactattgcttaaggaagagtcttttatcatcgttctgaatcacattgtctgtggacacaatcactagtgatactggcagagtgaattaggtaatctttaaaccaacctcccttttggtgttaaagtaaaaggttttctaaccactgggagatttgttggctcttggctcttgtaccatcagatacctacctttattcttggcttttcctgggaccaaaaactgctgcttctgttggatcccctgttctgtggttgtcttggtttcagaaagatctgtctctttaggacaccagacaatcacaggcgatatctttgtttttcactttaggtttggtttatgcacttctgcctcctgacttgattctttcacctaatacttcctgagttttgtttctttggtaactctctttgaataacagcagccctacccacaagaacaccgtggctttacagtggagatgggaaaagagttcaaaaccacctgcttatttctttctataacatattttcaccttagccacagaaaaaagaagacccacagctacctcggaaaagctccccgaaatccacagcgcctgtcatggatttgttgggccttggtaagagttggacttttcagcttccatgttcttacaaatgttgataaattctcagtgaccctggaagataggtagagatggggttctccagttttgtcttcattgccaagactgttctctcacattcttcctgatctgttttacatctgagcagttgctctaaggaagtgtttactgtgacacttttcagagcgacagtgtggtgtagtggttaagagcatggcctttggagccagtgtcgctctgtgttacttactgtctgtgtgaccatgggtagtttacttaacctctgaatgttgctttcataatccgtgcagtgagaatgagtctctacttcaaaggtgttgttggaaggattaaatgagataatgcctctaaagctcttagccccatgcctggcacatactgagccctccataaatgttagcagttttgctaaacagcacctttgagcctcatgtcaattccctgtactccactccctgcccccattcctttcatttttcagatgcaacctgtttctgagatggcctgtggtcatttttctccaaacctttgaaatcctgaactagtgattctgccctttcagaaagaaagcctgttgtctgcctttcacagcactgatggttgcactttgtttccatccgcttctgctgattgaggttattggctacttaggcttctaatttctgtacctttccttgctctctgaaaatgaaccctcctccataccttgcccttcaaatagccagaagggagccagccagccccccactgtggtgctgaaatacccttcaggcctgggcgtctgctgccctgtgcctgatagctgggctacaggcttccccagagcactctgggaatgtggggtgaagcctcttttgagaagccccgtccatgctagatggttccagaagtctagatttctaggtccatgagcttatgggccacctttgctttttgtctagaatagaaggaaggcatgggcttaataagcagtgctgcatcttaacttcgatctctctttctagatgctcctgtggcctgctccattgcaaatagtaagaccagcaataccctagagaaggatttagatctgttggcctctgttccatccccttcttcttcgggttccagaaaggtgagtcttgtgggctcctcaggattaaagaacattctgaaatgggtgattttgatatcttaatcatggaaccacgtcatgcttccttggtggagttggactttggttttcttgattcttcattcttcccttaacattgtgtcatttctgtcacagtctaagattgctgttcatgcctttttttctcctgctcaaaaagggtgggccatttgagttgcttctctggaaagtgtgtgatactgtgaaggctgatacttgaggctagctcctcggcctgagttactgccagaaaattgtaggtaggaaagacttgaaacctttaatggctaccattcgtgaaacgcctgctatgtctcaggcacagtgtgaggtggtttttgtatatcattttgtatatttcattaataatttcactccttcaccacaaacctgcaaagtggaaattttacagatgtggagacattagtttgtaaaagttatgtgactagcctgtggttatactagtaaatggctacactggggtctaaactcagttccctctgctgcatcatttgtgggttgttttgtttgtttattcctaccaaatcacatgttttggtgaaaggaaagaattgtaacagagcttaattatcaggtgtgttcagatagttgaatggtaaaaatgttaggaagctattaacttgagccatgaattcttattgcagatgttaggagcagcagagagggaagggagacccttaaagagacccccatgagaaccatttcaattctccccccgccctctttaccctaaggttgtaggttccatgccaactgcagggagtgccggctctgttcctgaaaatctgaacctgtttccggagccagggagcaaatcagaagaaataggcaagaaacagctctctaaagactccattctttcactgtatggatcccagacgcctcaaatgcctactcaaggtagatttcatgggtgtcatggccatgtgccaggtagagacatgagggcttccatgcaggaattatttattgtgacagaggacagttgctttgggggccaggatgtcatacaccaaacaaacctgaacatgaccaacgtatcagcagatggaaattaatgtaactcagagtcatacttctgtggagtctggggtcacaattcggtgaagtctagctcaaggtctggatctggaccctaaagggaaaatggctcggtcagcagcccattggtaagctatagcaggcctcgtagggactctaactactttgctgtgtaaagagcattgtgagtagagtaatcctgagaaattccagctggaaagggttagccagggagagttcgggctgactttatgtttttccctctttaaccaacctgtatgtgtgttttcttggcagcaatgttcatggctcccgctcagatggcatatcccacagcctaccccagcttccccggggttacacctcctaacagcataatggggagcatgatgcctccaccagtaggcatggttgctcagccaggagcttctgggatggttgcccccatggccatgcctgcaggctatatgggtggcatgcaggcatcaatgatgggtgtgccgaatggaatgatgaccacccagcaggctggctacatggcaggcatggcagctatgccccagactgtgtatggggtccagccagctcagcagctgcaatggaaccttactcaggtaagctaccccattttacttgcagcaagagttttgagccttcctcaagtttttctcggtttgtacctctccactatcctttgaatcctttccatgtagatgagataatgtaagagacattgttaggtttgcttttttttttttttttttttcctagaaggtctgtctaaagtcagactttctgaggagttctgggctcctgtagaataagcccaactgcctaaatctgaatctctccacacattctcaaaagcaaaaacaaacacacaaagaaaccctgtacaaacaatgaatgcagatattctcacaacaatctcatttggtagatagaatactgcaaggttcaaatggcatggcaatgggcatataaacaccaaatccagcggagccagcatcacagaggagactgtaaaaagagaagatggagcaggggcctagcaataataccacagataaagtaaccccccagaaggagaaggacctaccctcatcaaagacgtactgagaacaggtctgagatgtggtagattagaactctgtttacttggaggatcaaaaataagagacttcagatatataggagtataggtagtaaccttgggaaagcattgcttctcggggagatgggcatggcctaaaaggaggaggtaccctttagaggactggtggtgaaggaaagaaagacacgagaaatgggaatgagaatcacaaaatcaaatatacaccttcttccctcttccaaaataaccacttcactaataaaagatggtgctcttaatctaagaaatttagtaagcctccccaaaccttcacacctattattgctgattgagaaaaaataagaccttacaaaaatgaaccaaacatggaagctgacatttgtacacaactactacaggaagaaaatagaaaatgaaaatcaaaacatttcacgtaatgaatattctccctcaaaaaacagtcatgaagcagaagaaaattgttacacaatctaccaatctgaattaaatgtccttaaacatttgcagataagacaaaacaccttaaatcagaaattcaaaaacttaaagccaaaatggataaaaaactgcatgctgtgaaatgaaagtttactaaactcagaaaagaaattgaagaaaaagccaaaattttcgtataaagactcaattacaagttagctaaagaacaatagattgagctgaaaatatattcggcattgaggaaaggcatgaaacagctaagagaatgaaaactaaatatagaaagtagtaaaaagaattagatggaaattaatatggaagttaggcaaagaaaacttacatatatttggagatgcccaaagaaataaagacaaaataaataaaatatgggacagtattaatgtgtttaacaccagaaaacattctagaaataaaagacttggatataatatggaaagagcccactgtgtgtctgggaaaattgacccagaacagtcaactttaaaacatatcccagcaaatctacagactttaaagaacattcaaaatgtttaggggtccaaccttttccatacctcctacccacaaaaatctgttacttagaacaaacaaaaaatacccaggttgacatcagacttcctagcagcaaaatacaaaaagaataacaaggagagtagtattttaaagacactcaagtgtatgcaagacacaacaagtattttacaaccaagccagccaagctatccttcaggtatcaaggctgtaaaaaataaatatgcaagaactcagagaatatcacacttacaagactttcctggggaatctaacagaagataagcttcatccacctaagagatgactggggtcattttcatttttggcaaaagaactgatggtgagaattgaatgtttaattgagaatctaagactaaaacaaaggtggtgacaagcgttgcagaatatacattatattctgacaaacaaatacaactgaaaatgaaggaggagggagaaaagttgaataataaatattgtatgggaaagaagtagaaatcgaaggatgcaataagctgacaaaccaaatcacggaagcttgaataaggaaaaaggagaccaaggacattgctaaaaagtattactatgaaggtaatcactagaacaaacacgtgaaatgttctgaataccaagataattttcttcctttctttttttttttttttttgagacaaagtctcactctgtcacccaggctggaatgcagtggcacaatctcggctcactgcaacctccgcctcctgggttcaagtgattcttctgcgtcagcctcccgagtagctgggattacaggcacccgccaccacacccggttaattttttttgtattttttagtagagacggggtttcaccatgttggccaggctagtctcaaactcctgacctcaggtgatccacccaccttggcctcccaaagtgctgggattacaggcatgagccactgcgcccagctgagaatttttaaaaacagactacaaagtgcagcaaatacaataaacacagtaaaaatctaatatgatggagttgagaccaaacataccagtcataccagtaggcaactcttctatcaaaagaaaatgatgttcaaattggctaacaaagcaacactagttttgcactaggtacaaagaaatacaaagtgatttaatgtgaaaaccaagagacaggcaaaggaaccccagagaggtggtatggtgcatgtgtactgcacatgtgcatgtatagctatctttatcagggttatacttatttataagaagtacttttatgtttttgtttctctgtggtccagaataatttatgtagctctggtctttgaaggttttgtggaattcccatgtgaagtttgtgggcactattgctttttttgtagcaaatctttgatacttttctctgtttcttctatggaagtcaattttggaaaactgtatttacctagattttccatttcgccaaggttttcaaatttatcaaaagttatgcctagcagtctcattaatttttttcaaagaaccaggatttcgatttattggtgctacatttttccgttttctacctcaatttccgtaggctttctatgggtttactttgttattttctagctttcatagtggagattttaattcacttattttcattgtttcgtttttatttatataagtaatggaatgctataagtctgatgggaatatgtcagagggacgcatgagccaacttccagtggctctgactggccaaatgtgagacaatttgaacatcaaaaagagtaacaacagtaatggattatgacacactgaatggaaaaaacaaaacaaaaccatgagtccacggtgatattttttaaaaaccaggtgtggaatggagggaggaaaagccttctttacagaagaatgacagtagttgtaaaaagagcaaaggattgacacatttgcaaagaaatgcccttcagattatttattaattataatgaaagaaatatagtcactacctcagccaagtgatcaaacataaaattactgacagaggaacaaagtaatgtcatatgcttcctgatattttgtactaagaaagacatgtgtcacctccatagaatcttgccaaaaatattgaacctcgatccaattatgagaaaacatgagatgaatccaaattgaggggtatgctacaaaataactgtcctgggttcttaaaaatgtcagtgtcaggaagaaatggaaggaagtgttagggaaactggtctagcttaaaggagactacagagatctgaaaatgaaatgccatgtacattagaatatggtgttaatgttaaaattcttgagcgtgttcattgttttgtggttctgttaaagtgttcattcttatgaggtgcctcctgacttaggaatgaaatgtcgtgatagctgcagcttttttttttttttaatctgcaacttttgatactcatcaaaaaaatgtaagtttttttatagggagggagagaaaatatggcaaatgttaacagttggtgaatttaaggaagaagatacatgggttttattgtactattgtttcaacttttatgtcagtttgaaatttactttaaaagttggtacaagaaaataatagtttctcctaaagaaaaataacttatatagaaaatttactaggcttaggaaattcaaggcatttttctccataaagtatttttctgttcactgctaggggccagtctttccatcagattcatgaaggacccccgccccatcctgccccaggccttattccactgactgttttctcccagctccttcccttcttatacactgaagacacattagtcttcccccgcccccgccccgccaccgcctttgttcattctgaacagtccagttcctttttttcccccttgtgcaaacgagcaagcctgctcaagcgctttccctgacactgacagtaatagctgtgctgaagatgaggcgggagcactggggagggggctttcctttcagcttttaggattggccaggcaagttaacaataggccccttctatttaggatgagggactggaaaggaaaaagagaggaactcatgctgattttctgtcgactagatccagatgccaggatgccttctttccctccctgagctttagtctccgtcagcattgcactcccaaaaggtcattcacgtacgtggccttgaaatgatctgactgctaaggtccagggtttactgtccataacagagtttccctttgtctcattctccccatcctggcagagaaagggactctcaccctgccttttgcactaattggcggaatgcccacagcctggtctgaaagtctcctctctccctttcagatgacccagcagatggctgggatgaacttctatggagccaatggcatgatgaactatggacagtcaatgagtggcggaaatggacaggcagcaaatcagactctcagtcctcagatgtggaaataaaaacaaaacacctgtatggctgccattctcttcagccctcgctctcccctttccacagcctccacccctgacccccatcctcttttcctacctctctgtttggtttagaaattgctcaataagtcatttggggtttggcatcctgcccagccacttcccaaacatgaagacctctctgttgctttatgttgtacatgccccatagccatcccaacgtcctccccagtcctctcctggcaccagcaccttagaagttgttggcagaaggcacttaaactgtgggagaagtgtgcacacctttgagtcccttccctcaaggttaaagctcctgtcagactctcagaagggtctgtgggtgttgtatattaggcaaacaggggaaagcttagaggtccttctatatgtgttaataagctgtttctaagtgtttaaatttgaaaagcatcatgttctcatgatttatgggaatgaagcaagtactgaaatcaaattaaatactccctgggtcctgggtcagtttgaccctagccctggggtgaggcaagccccctcctatgaggatgagcaaaaatactactctcttcgccctgagttgctttctggatctggggcttcaggacttgctgcttcagtcagcctttattagcaccaaagactttatgaagatcccacacacagacacacatcccttcccgcctcccccctgccttcagtaggatctggctccgtggctggaggaccaacccctatagtgggaatgcagagcttaacgtgtactgcttgtgtgtgtgcgtgagtgtgtgtgtgtgtatgagtgtgtgttccgcctcccaccctctccccatctgctctgggtatttttgtttttgtttagttttaggtttacaacagagaggaattaatttatcagcagcctaaaactgttgtgtttttcttatggtttaaaaaacgccatgtcattgataactccctttctcccttcccttctcccggtctgctgatcactctttcatgcctgtgtatccagggtgctctgtttccccaccgttcccaggtgtacgaggcagagggccgggacagctttcctctcagtcattgttcaccccacttgaaaattcagacaagaaaactttgcttaaaagatttcatgtgtgggaaccacagttcctggctgcctttctcctgtgtatgtgtaaattccttaataaatattgcagggaaggactgtttgcttggccattactgtgcgtcactcttggaggagggtgcgttacacttaggttttctgttttccaaaggcaattgtttcacttcctgtattttagaaaattctgtacttctcatacccaagggtgaggcccaggctccagcagtcagaaagggggcctctctccactggcatctagagctgtgagctgagagaactccagagatcagcaccttctagagtcacagagcatcagagcggcatgctttccccccacaggtggagaaactgagacacggagaaaggacatggttggcaaatgtccactagagaaccctgggcagaaccggcagtagcctccaagtgtctggatttccagccccttgttctttccctataccatggcaattaagtagtgagttgaaattcctctctgccaagagagcagtagctttggctggtaaaggtaactcacccctctctgagctatcagaactggaccttccgtatcagtgtcaggaattaggacactcaatcctgggggcagtacgaaatacaaaaggccgaagaccatctttagtgcatttcctgctccctttgactccttttctgctctcaacaaatgtgatccttggacccttcctcccttctttcctttgagtacaccctttgagtccttaaagatgtaagtgggaggacagcacagtgactaggaaagttggctctgggtcaggctgccagtgttcctatcccttcctacgctgggacctgagcaaattactgaactcctgtgtccaggtaaaatggggacaatggtaatacttaggatagtaagaagcagttcctgtggtatatttagcacactactgggcacttactaagcactcagatattagcaggtattacgtgccagatctgtgttaggcagtagctcatttgacaaacatttaataagtgtcagtaatgtgccaaagaatgttttaggctctagagacaaagcagtgaataaaaactgtccaatctcataggatagtgtggtaggagaaatgcataataaacaaatagatttaattcagacagtataagacaaggggagagagtgggcacggggccatttggatggagtggtcaggagaaggttacatttggactgagacctaaataagcagccagtccgtagagatctggaaagagttggaaatagtttgggggcatcagtttgggaatcatgagggtacgggtgttatgtaaagctatgagaccggttgaagtcacttgagaaaatagaagagaactgagtcttggaacccatcagcatttagagtttgggaaggataaatagatgaatctgagatagtttctgcttttaagaagctcatggtctcatggggcagcaaatttataatttctttttttcgttttgtttttgagacagggtctcgctctgtcgcccaagctggagtgcagtggtgtgatcatggctcactgcagccttgacctcctgggcttaagctatcctccaacttcagcctccccaagtagctggggccaaaggcgtgcaccaccacactgggctaattttttttggagagacagggtctccctatgttgcctaagctggtctcaagctcctgggctcaagtgatcctcccacatcgtccccccatagtgctgggattacaggcatgagccactgtgtccggcctgtaatttcctatgcaggtggattatgggagctgaggtgaggggggacttagcccagtcaggaaaacttcctgaagagagtggcacttgagctgagccttaaagggagaagtaacagttaaccagtgaattggtgtggagaagaatattccagacaaatagtgttatgtgaataaagatacagaaacctacaagagcatggaacattttgggaggcacaaacgtatgtctagggtatgatgggagtgtggtgtgctgtgggagaggtggagctggaccaggtcaggggcctttccacaccctatgaaggagtttagcctgaagtatgagtggtggagagacttggtaggtttgcgttttaggtagctcactcttgcatcactgtgaacagcacgtttgaggaagcaagaccagagctagggaaccagagatgggaagagctgacctagggccgtggtggcaggggtaggggagaatggaggggcttagaatagcagttagtgattgatcatgaggcatgtgagatgctaaaaggtgttccacagaaatgctaaactaagcatggaaaagactgttatatcacctcatatctagaatataatatctacatagtaatctctttgaaaagtcctgtagtagacttttttcatagttttctagcacttaccaacacttattttaccacggagtcaatttttctggtatatctaataaccatagaatactatttgtgggaaaagcaaccagaagaatactttaggacaggagtgtcctatcttttggcttccctgggccacattggaagaagaactgtcttgggccacacataaaatactgataaaatgtgatatctgatgagctaaaaaaaaaaaatcgtaatttttttgttgtttgttttgtttgcctgttttgtagagatggagtctcactctgtcacccaggctggctcttggctcactgcaacctctgcctcctgggttcaagcaattctgcctcagcctcccgagtagctgagactacaggtgcatgccgccacacccagctaatttcttttgtattttagtagagacggggtttcaccgtgttgcccaggctgatcttgaactcctgagctcaggtaatccgcccacttcagcctcccaaggtgctaggattacaggtgtgagccaccacccctggccctcataatgttttacgaatttgtgttggtcctcattcaaagccatcctgggccgaatgcggactgtgggccgagggctagacaaggtgctttaggaggtagagttgggaggtgtcagtattggacaagatgtgggatggagagagaggaagcagtcaaatctcccatgtttctagattatgtcaaagaatttacagaaggaagagaagctggcttttctctctaggagggaagaagtagataattaggagtttggttttaggcttgttgaaattggattgcctgtgttatatccaggtctggttgaccagctggaaattggatttaagagtctgaagttcaaggaagaggtcaggctggagaaattaatttgtgagttagcccatggggtggtaattgataccataggagatggataggaatcacatagggtgggtttgtaaaataacagcagtgggctgggacaatttgtggggaaatatttatttttaatagaagctaaggaggaaaggcccaagaaggagaggagatggaacggggatgaggaggaatagtcagaaagttatgcaaaacaaaacaaaactctaggaaagtacaatgtcaaggaaccctaggaactataatatctagaaaaagggatgatcgcaaacatcaaatcagcaggaaaatctagtgagataaggattggtaaaaggactactgaatttagcatttggaaactgtaaacttcagttggagtggtagcgccagaaaccagattatagcgagttgaagggtgaattgaagcagttgtaaagtagagaaacaggctctgtaaaattaaatatacctggtaagatttaagggttacccttaagaatagaaatagagccgggcgcggtggctcactcctgtaatcccagcactttgggaggccgaggcgggcagatcatgaggtcaggagatcgagaagatcctggctaacacggtgaaacacgtctctactaagaatacaaaaaattagccgggcacctgcagttctagctattcgggaggctgaggcaggagaatggcgtgaacccaggaggcggagcttgcagtgagccgagatcacaccactgcactccagcctgggagacagcgagactccgtctcaaaaaataaataaataaataaaaattaaaaaaaaaaaagaatagaaatagagtatgtaaattccaaatcaataaagaggaaaaaattagaataagaaaatgcaaataagcaaaaatatcaaccatcctcctatcccccaagaaaaaggcagggttaagaatttatttgttttaaaaaaaaaaagctcagaaaagtggaccaaacttaactgaaaagtcatatgattgaaacaagtctaaatacaaaaaatacaatgtagatggaataaatagagttggattactgacattgtcagattgccgtgtgtggtggtcacgcctgtaatcccagcattttgggagaccgaggcgggtggatcatgaagtcagaggtttgagatcatcctggccaagatggtgaaaccccgtctctactaaaaatacaaaaattagccaggtgtggtggcaggtacctgtagtcccagctactcgggaggctgagacaggagaattgctggaacccgggagacggaggttgcagtgagccaagatcacgccattgcactccagcctgggcaacaagagcgaaactacttcataaataaataaataaatgtaaacacataaaaaaggtcgggtctgtaatcccagcactttgggaggccgaggcaggcagatcacaaggtcaagagattgagaacatcctggctatgtccaacatggtgaaaccccatctctacaaaaattatgaaaattagctgggcgcgatggtgcgctcctgtagtcccagctactcaggatgctgaggcaggagaatcgcttgaacctgggaggcggaggttgcagtgagctgatatcaccccactgcactccggcctggtgaaaaaaagaaggctgggcacggtggctcaaacctgtaatcccagcactttgggaggcagaggcaggcagatcatgaggtcgagagatccagaccatgctggccaacatggtgaaaccctgttgggtttccaagattgtcatggctagtctaggtcctttgtatttccatacacattttggaatcggcttttctttttacttttttttttttttgagacacaaaaatttttttgagactctgtctcataaaaaaacacaaaaattagctggacggggtggcgtgtgcctgtagtcccagttactcgggaggctgaggcaggagaatcacttgaacctgggaagcagaggttgcagtgagccaagatctcgccactgcactccagcctgggtgacagagtgagactctgtctccaaataaaatacaataataaaataaaatgaaacaaaatccattcctagcagggtgcagtggttcacatctgtaatcccagcactttgggggggctgaggcaggccgatcacttgagtcttaggagtttgagaccagcctgggcatcgtggcgaaaactgttctctacagaaaattagctgagtgtggtagcatgtgcctgtggtcccagctccttgggaggctaaggtgggaggattgcttgagcccagaggtcgaggctgcagtgagccaagatctccccactgcattccgacctgagtgacagagtgagaccctatctcaaataaaataaaataaaatagaatagaataaaatccattccttctggcatctcagacttttctttaagatcactttccttcacctgaagtatatcctttggaagtttctttagtgaaggtctctttgagtcattcctgaagtactaaaaatacaagaataggaaatgtttaaaatataagaatggaacaaggaagatcaggcaaatgctaaccaaaagtaaatggggatcctttatatcatttatatttatattttcaaaatagactttcagacaaaaagcattacaggttgagcatcttagcctgaaaatgcaaaatccgaaatgctcaaaatatcagcactgacacgacaccacaagtgaaaaataccacaactgacctcatgtgatggggtcacaatcaaaactttgtttcatgcacaaaattatttaaaacattgtataaaattaccttcagtctattagtatagggtgtatatgaaataaatgaattttatatttagacttgggtcctgttcccaagatatctcattatgtttatataaatattcctaaatgtgaaaaaatccaaaatctgaaacactctggttccaagcattttggataaggggtactcaccctgtaatagaaagaggacagaactatatgttataataaaaggttcatttcacaaggaaaatattaccattctaaaccagtatacattcttaaagcctcaaagtacaaatttatagaacttcatggaaaaagaatccatcatcagtgtgtgaaaattctccaccaatttgtgtgtgtgtgtgtgtgtgtgtgtatgttcgtatgtgtgtgtggaaattgaaaagctgattccttgctgggtgcagtggctcacatctgtaatcccagcactttgggaggccaaggcaggcagatcacgaggtcaggagttcgagaccagtctggccaacatactgaaaccctgtctctaccaaaaatacaaaaaattagccgggtgtggtggtgtgtgcatgtaatcccagctactcaggcgcctgaggcaggagaatcgcgtgaacccgggaggcggaggttgcagtgagctgagatagtgccactgcactccagcctgggcaacagaacaagactctgtctcaaaaaaaaaaaaaaaaaaaagaaaaaaagctgattacaaaacgtatatggaaatacaaaggacccagactagccatgacaatcttggaaaaagaaagaaaaaatttgggccaggcatggtggctcacacctgtaatcccagcactttgggaggctgaggcgggtggttcacctgaggtcaggagttcaagaccaggctgaccaacatggagaaaccccatctctactaaaaatacaaaattagctgggcgtggtggcacatgcctgtaatcccagctactcgggaggctgaggcaggagaatggcttgaacctgggagatggaggttgtggtgagccaagatgttgccattgcactccagcctgggcaacaagagtgaaactccatctcaaaataaataaataaataaataaataaataaatttgaagggattacactaccagattttaagatttcttatgcaactacagtaattaagacagtgtggaatcagtgcaggatagacatataaaccgctggaatagaacacaggagctggaaacagccccaggcacatattgatttatgaaggtggcaatgcaatgcagtggattaagggtagtcttttaaagaacggacactgggacgttagagaaaaagtgaaagttgacccctacctcataccataacagtaaatgaattctaggccgggcacagtggctcacgcctgtaatcgcagcactctgggagtccaaggaaggtggatcacttgaagccaggaattagagaccagcctggccaacatggtgaaaccatgtctctactaaaaatacaaaaattagccaggcgtggtagcacgtgcctgttatcccggctactcaggaagctgaggcaaaaggatcgtttgtacccaggaagcagaggttgcagtgagctgagatcatgccactgcactccagcctgggcaagacagcgagactccatctcaataaatcaataaaatacataaataaataaattctacatagattgaagatctagtgtgaaacttaaaaaaattaagctcctaaaagataatagtagagaatatcttcatgtccatgtggagaagccttaggagttaaaaagcactaatcataaaggaaagattgataaagttgattagattaaaattaagaactatttatgattccattaagagagcagaaaggcttgccacagagtaagataagatatttgaaatgcatatgataaaggcattgtatccagaatatatgaagaatgccagcaaaataagaaaaagacatattagaaaaatatgcaacggagaccagaataagcacttcaagcagactaactatgaagactaactttgaagaatgactaacattgaagaaatgctgaatctcattagtagttggggaaattaaaacaaaacaaaacaaaacaaaacaaaacaggagacatcatgaaatacctaccagaatggctaaaataaaagatcattctaagtgttgacaagaatgtggagcaacagaaactagtaggagtgtaaattgacatgactacttggagaatggtttaatagtatcatttgctagatagacaaacctatgacccaacaattctactcataggtatataccaaatggaaatatatgtacttgagcattaaaagatatgcacaagaatgttctggaagcattcataatagctccaaactggaaacaatccaaatgcccatcagcaggaaaatgcatagattgtagtatattcctacaatagaatactacacagcaatgggaatgatcaaactacagtttgccaggcgcggtggctaaacataggacattaaatccaaaatctgtggtaggtgcattcatatcagtaaataccaccagaccttaaatgacatctttcccttcttgattgaacactcaatattttcctaagaattcctcatgtttttttcgatgactgtgtaagtctcctcctctgtgtgcttcctctttgcttcctagtgtgatatgttatacccaaaataaactgagacattcttaacaaaaatatttaacctcaacctaatcaagtttctagatgtaacttccagcttctaggaagattaaaaaacattttttttttttttttgagacagagtcttgctctgtggcccaggctggaagtgcagtggggcaatctcagttcttacaacctctgcctcccgggttcaagcaattctcctgcctcagcctcctgagtagctggtactacaggcttccgccaccacgcctggctaatttttgtatttttagtagagaccaggtttcaccatgttggccaggctggtctcaaactcctgacctcaagcaatccacccacctcagccttccaaagtgctgggattacaggcatgagccaccgcacccagcctgcacccttaaattttatatcacctaaaatctgtccattttcaattttgccatttatcccaagaaagtcttttgatgcttttctttttaaaccaagatacagtctagctttatgcattgcatttggttattatgtctatttggtttcctttagtttggaacagtgcctctcactttttttttttttctcgtgagaatgactttttgaagggctcaagccaattagttggtagacagttctatgtttttaatcttcctagaagctggaagttaggtctagaaacttgattaggttgaagttaaatatttttctcaagaatgtatcagtttattttgggtacatcatatcacactaggaagcaaacaggaagcacacagaggaggagacttatgcagtcatcagaaaaaacatgaggaattcttatgaaaatactgagtgttcaatcgagaagagaaaggtgtcatttaaggtctggctgtatttattgatacgaatgcacctaccacagattttggatttcatgtcctatgtttagcagctgggcatgtttttcatagggaaagctgaacataatattggcctatctattctaaaagctgagatgacagaaatgcctttgtgtaatgtggagaaaggaatttaagaagaattctggaacaaattaccaaatatgttatcccttttcccaacccatccctgcctggcaggatcctgaagacattccctttaccaaagtcttgaagcatactttattcacaagagtactgggagcattacaacatgacttagtagttcataaaatgttggtgaagtgtatttccttgtctcttttttttttgagacagagtctcactctgtctcagtctgtcaccc

SEQ ID NO: 912 - DNA, 2775 bp, Homo sapiens
ggaagagctgccggaagtaggcggtggaggtggtagcggagctgacggcagctgccagggaaaccgaggcgcgggacgcaaggccagcagacaggccggccagagggtcatctgcgtccggcacccaggaggctcgtggtccgcctttgcctgggctgagggtctctggccccgcagcctctcttggaggcgggcctgtccctaagcccgccaaggggcgccgcgcccgaggggctgcggagtgggggacggacgcccccgacccgggaaggggcgtccggcggggccggaggagagggctctccccgctcaggaggtgcccctgggcgggggaccgggagtcctcaaccccggactgaggcaggggtctctgggggcgaggagggcgcgtcgccctctgcccccgccggcaccctggccatgacaggcaagtcggtgaaggacgtggatcggtaccaggctgtcctggccaacctgctgctggaggaggataacaagttttgtgcagattgccagtctaaagggccgcgatgggcctcttggaacattggtgtgttcatctgcattcgatgtgctggaatccacaggaatctgggggtgcacatatccagggtaaagtcagttaacctcgaccagtggactcaagaacagattcagaaagaaaaagatgacaagtggaaaagagggagcgaaccagttccagaaaaaaaattggaacctgttgtttttgagaaggtgaaaatgccacagaaaaaagaagacccacagctacctcggaaaagctccccgaaatccacagcgcctgtcatggatttgttgggccttgatgctcctgtggcctgctccattgcaaatagtaagaccagcaataccctagagaaggatttagatctgttggcctctgttccatccccttcttcttcgggttccagaaaggttgtaggttccatgccaactgcagggagtgccggctctgttcctgaaaatctgaacctgtttccggagccagggagcaaatcagaagaaataggcaagaaacagctctctaaagactccattctttcactgtatggatcccagacgcctcaaatgcctactcaagcaatgttcatggctcccgctcagatggcatatcccacagcctaccccagcttccccggggttacacctcctaacagcataatggggagcatgatgcctccaccagtaggcatggttgctcagccaggagcttctgggatggttgcccccatggccatgcctgcaggctatatgggtggcatgcaggcatcaatgatgggtgtgccgaatggaatgatgaccacccagcaggctggctacatggcaggcatggcagctatgccccagactgtgtatggggtccagccagctcagcagctgcaatggaaccttactcagatgacccagcagatggctgggatgaacttctatggagccaatggcatgatgaactatggacagtcaatgagtggcggaaatggacaggcagcaaatcagactctcagtcctcagatgtggaaataaaaacaaaacacctgtatggctgccattctcttcagccctcgctctcccctttccacagcctccacccctgacccccatcctcttttcctacctctctgtttggtttagaaattgctcaataagtcatttggggtttggcatcctgcccagccacttcccaaacatgaagacctctctgttgctttatgttgtacatgccccatagccatcccaacgtcctccccagtcctctcctggcaccagcaccttagaagttgttggcagaaggcacttaaactgtgggagaagtgtgcacacctttgagtcccttccctcaaggttaaagctcctgtcagactctcagaagggtctgtgggtgttgtatattaggcaaacaggggaaagcttagaggtccttctatatgtgttaataagctgtttctaagtgtttaaatttgaaaagcatcatgttctcatgatttatgggaatgaagcaagtactgaaatcaaattaaatactccctgggtcctgggtcagtttgaccctagccctggggtgaggcaagccccctcctatgaggatgagcaaaaatactactctcttcgccctgagttgctttctggatctggggcttcaggacttgctgcttcagtcagcctttattagcaccaaagactttatgaagatcccacacacagacacacatcccttcccgcctcccccctgccttcagtaggatctggctccgtggctggaggaccaacccctatagtgggaatgcagagcttaacgtgtactgcttgtgtgtgtgcgtgagtgtgtgtgtgtgtatgagtgtgtgttccgcctcccaccctctccccatctgctctgggtatttttgtttttgtttagttttaggtttacaacagagaggaattaatttatcagcagcctaaaactgttgtgtttttcttatggtttaaaaaacgccatgtcattgataactccctttctcccttcccttctcccggtctgctgatcactctttcatgcctgtgtatccagggtgctctgtttccccaccgttcccaggtgtacgaggcagagggccgggacagctttcctctcagtcattgttcaccccacttgaaaattcagacaagaaaactttgcttaaaagatttcatgtgtgggaaccacagttcctggctgcctttctcctgtgtatgtgtaaattccttaataaatattgcagggaaggactgttt

SEQ ID NO: 913 - protein, 372 aa, Homo sapiens
MTGKSVKDVDRYQAVLANLLLEEDNKFCADCQSKGPRWASWNIGVFICIRCAGIHRNLGVHRVKSVNLDQWTQEQIQKEKDDKWKRGSEPVPEKKLEPVVFEKVKMPQKKEDPQLPRKSSPKSTAPVMDLLGLDAPVACSIANSKTSNTLEKDLDLLASVPSPSSSGSRKVVGSMPTAGSAGSVPENLNLFPEPGSKSEEIGKKQLSKDSILSLYGSQTPQMPTQAMFMAPAQMAYPTAYPSFPGVTPPNSIMGSMMPPPVGMVAQPGASGMVAPMAMPAGYMGGMQASMMGVPNGMMTTQQAGYMAGMAAMPQTVYGVQPAQQLQWNLTQMTQQMAGMNFYGANGMMNYGQSMSGGNGQAANQTLSPQMWK

SEQ ID NO: 914 - DNA, 2874 bp, Homo sapiens
aaccgaggcgcgggacgcaaggccagcagacaggccggccagagggtcatctgcgtccggcacccaggaggctcgtggtccgcctttgcctgggctgagggtctctggccccgcagcctctcttggaggcgggcctgtccctaagcccgccaaggggcgccgcgcccgaggggctgcggagtgggggacggacgcccccgacccgggaaggggcgtccggcggggccggaggagagggctctccccgctcaggaggtgcccctgggcgggggaccgggagtcctcaaccccggactgaggcaggggtctctgggggcgaggagggcgcgtcgccctctgcccccgccggcaccctggccatgacaggcaagtcggtgaaggacgtggatcggtaccaggctgtcctggccaacctgctgctggaggaggataacaagttttgtgcagattgccagtctaaagggccgcgatgggcctcttggaacattggtgtgttcatctgcattcgatgtgctggaatccacaggaatctgggggtgcacatatccagggtaaagtcagttaacctcgaccagtggactcaagaacagattcagtgcatgcaagagatgggaaatggaaaggcaaaccgactttatgaagcctatcttcctgagacctttcggcgacctcagatagacccagctgttgaaggatttattcgagacaaatatgagaagaagaaatacatggaccgaagtctggacatcaatgcctttaggaaagaaaaagatgacaagtggaaaagagggagcgaaccagttccagaaaaaaaattggaacctgttgtttttgagaaggtgaaaatgccacagaaaaaagaagacccacagctacctcggaaaagctccccgaaatccacagcgcctgtcatggatttgttgggccttgatgctcctgtggcctgctccattgcaaatagtaagaccagcaataccctagagaaggatttagatctgttggcctctgttccatccccttcttcttcgggttccagaaaggttgtaggttccatgccaactgcagggagtgccggctctgttcctgaaaatctgaacctgtttccggagccagggagcaaatcagaagaaataggcaagaaacagctctctaaagactccattctttcactgtatggatcccagacgcctcaaatgcctactcaagcaatgttcatggctcccgctcagatggcatatcccacagcctaccccagcttccccggggttacacctcctaacagcataatggggagcatgatgcctccaccagtaggcatggttgctcagccaggagcttctgggatggttgcccccatggccatgcctgcaggctatatgggtggcatgcaggcatcaatgatgggtgtgccgaatggaatgatgaccacccagcaggctggctacatggcaggcatggcagctatgccccagactgtgtatggggtccagccagctcagcagctgcaatggaaccttactcagatgacccagcagatggctgggatgaacttctatggagccaatggcatgatgaactatggacagtcaatgagtggcggaaatggacaggcagcaaatcagactctcagtcctcagatgtggaaataaaaacaaaacacctgtatggctgccattctcttcagccctcgctctcccctttccacagcctccacccctgacccccatcctcttttcctacctctctgtttggtttagaaattgctcaataagtcatttggggtttggcatcctgcccagccacttcccaaacatgaagacctctctgttgctttatgttgtacatgccccatagccatcccaacgtcctccccagtcctctcctggcaccagcaccttagaagttgttggcagaaggcacttaaactgtgggagaagtgtgcacacctttgagtcccttccctcaaggttaaagctcctgtcagactctcagaagggtctgtgggtgttgtatattaggcaaacaggggaaagcttagaggtccttctatatgtgttaataagctgtttctaagtgtttaaatttgaaaagcatcatgttctcatgatttatgggaatgaagcaagtactgaaatcaaattaaatactccctgggtcctgggtcagtttgaccctagccctggggtgaggcaagccccctcctatgaggatgagcaaaaatactactctcttcgccctgagttgctttctggatctggggcttcaggacttgctgcttcagtcagcctttattagcaccaaagactttatgaagatcccacacacagacacacatcccttcccgcctcccccctgccttcagtaggatctggctccgtggctggaggaccaacccctatagtgggaatgcagagcttaacgtgtactgcttgtgtgtgtgcgtgagtgtgtgtgtgtgtatgagtgtgtgttccgcctcccaccctctccccatctgctctgggtatttttgtttttgtttagttttaggtttacaacagagaggaattaatttatcagcagcctaaaactgttgtgtttttcttatggtttaaaaaacgccatgtcattgataactccctttctcccttcccttctcccggtctgctgatcactctttcatgcctgtgtatccagggtgctctgtttccccaccgttcccaggtgtacgaggcagagggccgggacagctttcctctcagtcattgttcaccccacttgaaaattcagacaagaaaactttgcttaaaagatttcatgtgtgggaaccacagttcctggctgcctttctcctgtgtatgtgtaaattccttaataaatattgcagggaaggac

SEQ ID NO: 915 - protein, 427 aa, Homo sapiens
MTGKSVKDVDRYQAVLANLLLEEDNKFCADCQSKGPRWASWNIGVFICIRCAGIHRNLGVHRVKSVNLDQWTQEQIQCMQEMGNGKANRLYEAYLPETFRRPQIDPAVEGFIRDKYEKKKYMDRSLDINAFRKEKDDKWKRGSEPVPEKKLEPVVFEKVKMPQKKEDPQLPRKSSPKSTAPVMDLLGLDAPVACSIANSKTSNTLEKDLDLLASVPSPSSSGSRKVVGSMPTAGSAGSVPENLNLFPEPGSKSEEIGKKQLSKDSILSLYGSQTPQMPTQAMFMAPAQMAYPTAYPSFPGVTPPNSIMGSMMPPPVGMVAQPGASGMVAPMAMPAGYMGGMQASMMGVPNGMMTTQQAGYMAGMAAMPQTVYGVQPAQQLQWNLTQMTQQMAGMNFYGANGMMNYGQSMSGGNGQAANQTLSPQMWK

SEQ ID NO: 916 - DNA, 23367 bp, Mus musculus
  misc_feature (1)...(23367): n = A,T,C or G
nnnnnnnnnnnnnnnnnnnnnnnnnnnnnnnnnnnnnnnnnnnnnnnnnnnnnnnnnnnnnnnnnnnnnnnnnnnnnnnnnnnnnnnnnnnnnnnnnnnnnnnnnnnnnnnnnnnnnnnnnnnnnnnnnnnnnnnnnnnnnnnnnnnnnnnnnnnnnnnnnnnnnnnnnnnnnnnnnnnnnnnnnnnnnnnnnnnnnnnnnnnnnnnnnnnnnnnnnnnnnnnnnnnnnnnnnnnnnnnnnnnnnnnnnnnnnnnnnnnnnnnnnnnnnnnnnnnnnnnnnnnnnnnnnnnnnnnnnnnnnnnnnnnnnnnnnnnnnnnnnnnnnnnnnnnnnnnnnnnnnnnnnnnnnnnnnnnnnnnnnnnnnnnnnnnnnnnnnnnnnnnnnnnnnnnnnnnnnnnnnnnnnnnnnnnnnnnnnnnnnnnnnnnnnnnnnnnnnnnnnnnnnnnnnnnnnnnnnnnnnnnnnnnnnnnnnnnnnnnnnnnnnnnnnnnnnnnnnnnnnnnnnnnnnnnnnnnnnnnnnnnnnnnnnnnnnnnnnnnnnnnnnnnnnnnnnnnnnnnnnnnnnnnnnnnnnnnnnnnnnnnnnnnnnnnnnnnnnnnnnnnnnnnnnnnnnnnnaaatcattagaaaggaaaacacaggaaacactatgacaacttgaggtcctcaagcagctggtccctgggaggggacactgtgggcatgtatgagtgcacacatgtgagaaaagtcacgggagttctctggtaggagggtggggagatgccaaagcgtgacaaaaactttcctacaccctatatggttgaaaggcaacaggaaaaaaaaaaaaaaaaaaaaaaaaccaaccaacccaacttagaaacaagtagctgcctgaagcctaacactgaagtcaaaatttacctggcaaagaaaaaccgaagactgactctgcacagccgagcaccctcccatttaccacaagagataaaaagcaggatctgcgcatgtgaatggagacctgtgggaaagggttagtcccaagtgtccagtgcttcaaagaaggtcactctgcctgctctgaccccaaacaagccatgagccatccacatggaagctgcttttgtgtttatgcatgtgtacatgtatgtacatgtatgtgcacatgtatgtacatgtatgtgcacatgattgtgtatctggatgccagaggtcaaactctggtctcattcctcagatgacgtctaccttgtatttttgaggcagtggcctcttgttggcctagagctggctgacttggctgtctgacaaggcccagatatctatccatcgggattccaactattttgttttaagtctgttctggggaattgaactcagagccttgtgattgtgcggcaaatattttactgagtcagtcatctcaccatcccagtgagctgctttccagactatcaagaggcaacgaatgcagccagactcagaaccctcaatgcctttcttctcccaggggctgccccagccttgctctcaaaggcagtctatgccaatgagcatgcataggcaaagcaggctcaaaataactccaagcacatgccactcccactggcaaaatacaggaataaatgactggggaaagcaaaaggagagaaccccaaacacatccccttgttaatttcaaatggccctatagacaatgtcatttccttcatttagaaagaaactgctccaacatagagtcatagctgacttacagtgtcccaggaaaagccctgtgcattttattccagtgaagggactgtgcagatcacattcaaggccccataccagctagacaagtacccaccactaaaccccaacccaagcccaccttgagcctttggctggagggttcgcatggccgctggtggctaaatgataaagtaatattttctccaagcagtaatcggtgcctgctaaagagaaatccatttgacaggcactttcctttattccttaaaacaaacaaacaaacaagatctcttgtaaccccagctgaccttaagctctctatggaacaatgaatgaccttgaacttctgaggctcctgccttcacctccagagccctgggattacaggtatgcacttccatgaccagtttgtggaaagactgaactccagctcaggacttcctatctgggggcaagcactctgccaactgaaccccactcccaggcctccctcctcaatattgtaagtatttactttaacctggtactgcctataaagccaagcaaaggcagggttaatttttttcattacgagcctgtttccaacattgctccttctacacattttctcttgaagacatctgcaagtctcacgaggccttaaaaagcttagcactaaatctttttagtcacttaatccccaaaatgtccctctttggagataatttcctttatgaaaggaaaccttaacctgaccctagtctccagtcaaacttgctaatgaaaggaaggatctttcctttgtgctccaagtttctgggagaaatgtcttggaaaggggagcattctgtctggtcctagggaagataccagttgccagtggtgttgtctttgtctcccggttacttcagcagtcaagcgatagctgagttagacctagtggatggaaaatgggagaaactggtgccaaacagaaaagaggagctatctagtgatgatttgggtctgcccagcagaggacaggatccccttctgcagtaatgggctgcccatgcctaggcagacatgcccagagacagaaccatccacacagttcgagggacagagctccttctcatatgaaggtgtcgcagatggctctggagacaccttccaaccctctgtctgaggctccataacgacagggggctttcaaggcctggatggaaaaggctattacttgtccttcatcaagcctgcctctcttttgccgtgaaattaaaagtgagaccatcccatatgttatttaaagctccatttccctttacctcacatatgtgagcaatggtggagaaagccgtttgcttggttaattacagctctttactggcaaggaagagagagagcacatgctggggaagggggcaaaatgtaaagatatattaaaataagtcgtatttattgagtacttactttgtgccctatgtgacactaaagattttacatgcatgctatatttaatcttcccaataacccaagaagtaaatgctactgttacatgaatattatgacaaagaaaatagagatagtcatatacattcttgggatctaaactggaaaaccatgtctggtgaatcagttctcaaaaccaagtaagtcctggggttggggatgtgccttagtcaatagtgtgcttgcttagcgcacaaggtcttgcttgagttccatcttcagcaccacaaaaactggtatggcttgcccatcgttccagcgctctagaggattaaaagttcaaggtcatctttgtgctccatgtatacacagagtctgagactaacctaggagacatgagaatccctagctcaaaaaaaaaatatatatatatgcatatatatatgtatatatatacatatataataaaaataaaataaaaagaagcctagatccatcatgctgactgctttctatccgtggtgtaaatctcgtcacggtggcagtttcaggtgtccattgcaatgtgtcggattttggagttacaggagcccaggagctgtgcagagttggaacgttagcacttcactgggctaaccccagcactccctattgtcaaccacacagccacactgcctggtctacagtcctttctctgtggctcctgtttaaagtgaaggaggaagaatgtcccgtgagtgaaagtgaccagccttcaaggcaggtgagaacacaggaaaagcgccaaagaatctgagtcccagagaatttgggaattctcttcagaagcccaagaattagctgtgcaggaaccaaggtgaagaatcaactcaaccttcccaaatgaataattttagtctcaagagagacggggaaattatgcagcagaggtctccctgcaaagagtctaaagccaacagttttcatcttactggagtgtgtgggtgtgttctaacaaccctcagttctcttgcctctagccaacacctcagctgatatgaaggctgagagatctcttatttaaaccaactgcttggttgctttatttcattgccttttgttcttgtagccttttaatcagaaagcagggagtggggttttgttttgttttgttttgctttcctgtctggggatcgggatcagggcgttaggcatgttgacaaacatttaccactgagatatatataccactaggccctgaaataatatttgcttcagttgaaagacttcatatttccacagatcagaggctttacttttgaaatgacccagatgggccaaaagatgggtcagtctgtaaagaactttctgggcaaacatgaagagctgagttcaatgctgcacaacccactaaaacacctgaatgtgacgctacccacttggaatcccaacacagaggacacagagctgggtagacctgaggctggccgtgcagcccaggccaatgagaggccctgtcttaaaaaataagaaatgtcatgggaggctggcttctggccttcacatacacccacgtgcacccacatgaacacacacacacttcccaccccatctttctgatgatagattgctcttgatagactcagcccatgtgtgggggtgatcacggggccgtttctaggagccctgccgctctaccaggggttgctgagttctctttagaaatccactgtccacagggctctaggcacttcctcttgttccacagctgccgcgggacacgggcagtaaattgcgaggttaaggaaaaggaagacaagtcttttccatggagaacagaaacggctccttcaattatttccgaaagtcctgccctccttcccacatttatcacctcacttttgagacttgtttgtccttgggccttgcatccacaaagccagcacagcaacggccatgtggactgaagaaactcaaagaacaattcttccttctggccccagggttagtcaagtaatggttattgcattgctaattgagtggccttttgttcagccaacttaccagggtgactctaaaccgtttctgtttatttgcccgtctagccaattttcttcagataggaaatcttgtcctgctacaaaactttgatgaaaatctgctcataatcccattttattgggggtggagggagacttttcagaaatccaggttgaatttgaagtaaaagtgcttctcagagctggtaatgattttcctaaactggtagaggactgcaaggtggaaggctgccctttatttccagaatcattttcacctgttaagtgttgaaggcagaagctcagacacaggatcccggggtgggggtgggggatggggggcagggggcacgattttccctacttgacatttgatagccctgtctttgcaattcaaccctctgccaggactactcaccccttggaaagcagagtcagtctctctctctctctctctctctctctctctctctctctctctgtgtgtgtgtgtgtgtgtgtgtgtgtgactctctctctctgtctctctctgtcttcatcatttgggaaaacattaactccatctttttattacaccctacaatcattaaaaaaaaaaaaagtctgtgggttttttttttttttcctttcaaaaacaaagccaaaggactccccgggatggatctcaggtggtagaatacatgcctcacatccatgaaacccgggattccatccccattgctacaaacaaggacaagaaaaccctttatattctctctcctttgtgaaggtgcatgtgtgtgtgcatgtttgagctcactcgagcacgtcagggtttgaagagggaattggtgtgtgatggcctacttcggttttagggatagtctctcctgggctgcaccaagagttgcctgtctctctctccagtggtggcattgcaagtatcacctcacatggctgcctttctttctttatttgtttatttctctttctttctttccttctttctttctttctttctttctttcttcttttccttcgttatttctttcttttagcatagattctgggaaaccgagttctacagagcaagcactaactaagtcatctctgaacccttcattaaatcagcctttaatgccgatgcctcctgccatgtaccatcaagataaaggactgtgcataagctttctccccgactaacttggagcctgttttggacagagcagagctttctatcgcatacccagggacgggcgaattaaccagctgcagtgtaagcaacaggaggtggcaggatgcttgcccctgtgccactggctttggaagtatcccccacaaactgtggccaaaactagttattccctgggctaaagccatccttagaacttggggacactgccaaagccctgacagcccctgagcctggcctttgttgccaaagccccaggggaaagctgttaattctttaaatgaaggttcagtaaacaaccaaggagcttggttcgctcagcggtgggctagataggaaaactgctatctgtgcactgtcttccaggagcttggactgtttgggagagaggagtaaggcacatttgcttttaaaaaaaaagttgaatcacgagagatgtcactcaaagcagtatgtaagtaaatgtggaggaagaagcactcagagggttcattgcaaggatcagaaaaagacagtcatggtaatggagtggagagagcctgggctctggagccaggcagactaggtgggcacagatccttaagtgaatacaaggaggggagctagctcctccccctcagcaaacttcagcttccttatcctgaaaaacagacctgcctagtgaggggcttatcccaggttggatgcatgcgtggaacaagctttcaggagacgtttgcaatgttttttctgatgtgcatcacaaagctggggctgcaactaagtaggcagaccgcccatctcatgtgtacataatcctgagttcaatcctagcaccacataaactgggcacggtgttggagacaggagcaccagagattcaaaaatgaactcagctccacggggaacttgaggccagaccgggatacaggaaacccactgccagtggagtaaagcaagagcttccagcaagctgggcaagcactcttaccaacggagctacgctactagtcctcggcatatccaggcacgactgagatcatagactaacacagttttcattcccaccatgtgcagtttctttcataagtatttccccttactaataacaactcttcacaaacacttaccacatccatattcactccgttcgcagatgtactaaatcatctcaactagtctgctcatggcggacacttagggctactcagctattactaactattctattattaacactattgtcagcagcagccccgtgaagagctttgtagcatgactgcagtttcctggggctacatcatgaaaggtagaattactaatctcaaaaggttctggctgcatacaaaatacttttcactgaagctgttcaaacaccacacacacacacacacacacacacacacacacacacacacacacactcctgctactgacaagcgagagacagctggtcttttccaatccagaagccaaatattatctttgaaagggggaaaaaaaatccctctcttttttttctctaattctatagtcaccaaatagcatgtcattgttgttttatctgctttcctccagcaaagagacttcacaggagctaaagagacctgtgcagaagctttcttttgtccaccaataatcaacaaatattaattatgcaaatcattttactcagattgtactctctgtcgttcagggacaggtttgcaagattccctttctcccattttagcctttgggaatgcaggaatttggaggctagacacagctcaccatcctgctgctaccgatcttgaacaccagcgctctcttaatgggtctaatattccggtccacgggctcttctgtctgtcctaactagtttatggaaatatgagcctatgttttagtaatgattggatataattaaaagtgcttgtggaagttcttggcttttaacttagcagtttttgagggtcgcacttcctaatttcatccttagcttttctggatcacataagtgcagggcagaagaggactttgacagcacattttgaaggagagtgcccaggccatacaggaagatggagagaaagagttcccaggctgtaaaacagctccccagcacttccaaccgaaagccttccttagctaaagaaggaggtgcaaatgatagtacagttagtagactgcttgcctagcctacacaaagctctgatttaagccctgtcagcacgaaaattgggcgtggtggcacacaactgtaatcccagtactaggcaggtgacaaacgggatcatcagaaattcatggtcatccttaactactggagcctgagtccagcctgtactacgtaaaactgcctcaaacaaaacaaacaaacaaacaaacaaacaaacaaaaaaggaacgggagaagtggggcggggatggagttgagggcgcagtctgggcctgcctatcctttggtccattccaggagggggtgggggcggtatctgggttgcatagcaacccaagctcctgctgccggatgtctcaccacccccagtgcccccggcattggatcccgcggtctctggctggaggtctggttggttctgaccccacccttttctccctccccgcctagcccaggctcggcgccggtcggatcccgcgcgagtctgggaagcagtctgggcgcccactgcaaccttagcctgtctgagattccctagccatccacgcccccaacccgacctaactagctcttcactaagacttcccatcttagtgttctgcgtgggagacgcgagataggcatgaagcgaaagctctgggctcaggccaggctttgcagtcccaggctgctccatttggtctcttggagctcgtggagcgcccactgactgcgcatgaatcgcggctagcttcccagctgggactccgtaattatctgttaactagatgcatccccctatgtgcttatgaaatgaaaatgaaccagtgtttctgtgcggatttcttaggatgtgattacacaaagtcctcgccgctcaattctttataataaagcacatttcaatcattttacatacacacacacacaaatctcttcacgaaattgttgccactattgtgactttcttcctgggagtatatctgcttctggatgggtccgcaagtgctttctgccacacctgaccctaatgtcattatatgaatatgtagtaacacacacttgcttggaagagttttggtagtaatcactcctgacagctcagagtatagaaccctggcggaggttccaacattgccgcctactggttaggcaggctccaagtcacacacccccatccccagtcttgtctcaagttctccacccgtaaactccaggtctaaaattctatccacgtgggtaggatggatgcgcgacccgcagaaacaccctggctggcatcctgctttccccaactttgagaacattatccggccaggctctggacccatactgacttaaaacacaacagcagtggctcttggacttctgtttgcccgcgccctgcgccccgcccccgccagtctcctcccgccccgtccgaactgcgcatgcgcctccccgggagcgtgtttttataaaagtccggttcgggccagaaacttcaattttgttgcctggtgcagcaggtagcagtgaccctctgaggcgtttggtgctccggtaaccaccacggctgtagagcgagtgttgccatggaaccgatcagtgtgagtgtaagtccacttgcatcctactttgtagtaaacgtgcaaacgtgtgaacttagagctcagcccctttaaggagcgggttgaagcaactagaaccttgaggggtgtcagggtcacaaggaggagcgggaactaatttttttttatgtgtgtgaacatggctatagggggaggaagataggaatatttttgccagtaagttgagtgggacgggttcagatggagctttcctaaggttgctcttgtttccctcccccttgagtcctgcggcgcgcgccgacttgcacgctgtttgcaaacgtcccagttttttgaaaaagggagaagggcttgccctctgtcccaagactcagaccatcgtctggtcctcctgaaaacaggagttttctttgagtttcttacattgtgtgaatttagagactttagtcggcacgcgtaggcactacattctgggtgagcttcgaaccggagcgtcttggagcggttcttggagttaggagtgcggttctgaaattccatagtgcagacagaggagcgcccgtcgtcggcgggaaaagtgagctagtctgccgcgtcgcttgcctagagggggggcacaaactgcggcagccgcggagaaaacgtcgctttgggatggagcagcagcgctttgcgggcatccgacccgccacttccccgcagtggcaaacgaacctcccgaggtcgggcttgcctttaggatcgttcctgagaaagggtcataagtctgtaccatgatgctgctggccatgacggcggttggggacaggagggcatgttgggaccgcacctgggttgtgccgggtcgccggagggatgaacaggtgcaagctcggagactgtttgactgagccccagtgtttaaccgtcggtggtttcctgagccttttgaaaccccctcgcttagggagggttttgttctttggtgattttttttttttcgtttcctccggcggcgcgcaattcaaaggcgctcgctctggagccgcccaatctgtcgctcgcacccggaggaacgatcctggcgcgcagccaggaggaacccctagaaccgctgcgtgttggtcttagacctgggtatggtgggcaacggtgccagcccctaggtgggtgactcggacatcggggtgcgcacggtctggaccactcctgctgcctacctcggactccaataactaactgggtccgctgcaggatgggaagcgaccggaaagtgaggaagtgaaacttgggggcgaaaaccacggggtacagaccccgtgactttccccacccaggacagtgtgactctaacgtcccagatccacccagtgataaacatgggtttggcaagagagacccaccttccagagaagcgccacaatgggtgaagtaggggagtgctatttgctcctttctaacactctgctgagcctaaccccccaaagaccttcactttatccccgctttcttcactacgcatgactcgaaatgtaatagtttgtgttagacagacgtgagaaaaacaaggttttgcgcctaaaaagctaagagtctttgggggacccccaccgtcaagctccgtctttctttctttctttctttctttctttctttctttctttctttctttctttctttctttctttcttcctttcttccttcctttctttctttctttctttctttctttctttctttctttctttctttctttctttctttcctcctttggctaatcctcatacagaaatcccatctccttcaacacagactttaaccccactccgctggataccaccgcacacagttttgagagtgacttctttgtttgaatggaggatttgtttgtttggtttggttgtgggtttttttggcttgggtttttgtttgtttgtttgtttgtttgtttgtttgtggttgggggggctttactttttttcctccgaggtttttttttttttctttcctctcgtgggcggggcaggaaagctattcaagactaagctgtgaagtccttagactctcaacgtccttttgttctaagcaaagactttcctaattggttccactaaagagggcatataacaagtgactggtggaagatggagaacaccattggttgcaggattctgtgttctctctggaccttagccagccctttggagtttcctgggaaaggttgtgttaaaacctgcaatcaatactagctttttaggcaacagaaacacttaaaaattgggaaggcttgctgaccttgaagtgacgttgtctgtccctgtttcctttgcagatatacacttctgataactactctgaagaagtggggtctggagactatgactccaacaaggaaccctgcttccgggatgaaaacgtccatttcaataggatcttcctgcccaccatctacttcatcatcttcttgactggcatagtcggcaatggattggtgatcctggtcatgggttaccagaagaagctaaggagcatgacggacaagtaccggctgcacctgtcagtggctgacctcctctttgtcatcacactccccttctgggcagttgatgccatggctgactggtactttgggaaatttttgtgtaaggctgtccatatcatctacactgtcaacctctacagcagcgttctcatcctggccttcatcagcctggaccggtacctcgctattgtccacgccaccaacagtcaaaggccaaggaaactgctggctgaaaaggcagtctatgtgggcgtctggatcccagccctcctcctgactatacctgacttcatctttgccgacgtcagccagggggacatcagtcagggggatgacaggtacatctgtgaccgcctttaccccgatagcctgtggatggtggtgtttcaattccagcatataatggtgggtctcatcctgcccggcatcgtcatcctctcctgttactgcatcatcatctctaagctgtcacactccaagggccaccagaagcgcaaggccctcaagacgacagtcatcctcatcctagctttctttgcctgctggctgccatattatgtggggatcagcatcgactccttcatccttttgggagtcatcaagcaaggatgtgacttcgagagcattgtgcacaagtggatctccatcacagaggccctcgccttcttccactgttgcctgaaccccatcctctatgccttcctcggggccaagttcaaaagctctgcccagcatgcactcaactccatgagcagaggctccagcctcaagatcctttccaaaggaaagcggggtggacactcttccgtctccacggagtcagaatcctccagttttcactccagctaacccttatgcaaagacttatataatatatatatatatatgataaagaacttttttatgttacacattttccagatataagagactgaccagtcttgtacagtttttttttttttttaattgactgttgggagtttatgttcctctagtttttgtgaggtttgacttaatttatataaatattgttttttgtttgtttcatgtgaatgagcgtctaggcaggacctgtggccaagttcttagtagctgtttatctgtgtgtaggactgtagaactgtagaggaagaaactgaacattccagaatgtgtggtaaattgaataaagctagccgtgatcctcagctgttgctgcataatctcttcattccgaggagcaccccacccccacccccacccccaccccattcttaaattgtttggttatgctgtgtgatggtttgtttggtttttttttgttgttgttgttgtttttttttctgtaaaagatggcacttaaaaccaaagcctgaaatggtggtagaaatgctggggttttttttgtttgtttgttttttcagttttcaagagtagattgacttcagtccctacaaatgtacagtcttgtattacattgttaataaaagtcaatgataaacttaacttggcggtgtgctatgtcatcatttctgctggctcttagtaataacatgtttgggaaagtagaataatgcacacatttatggcttcccggagaccctcctgggtgtgtctgtgtgggctcacatatgtgcacaagcattattcctttggtggtcaacttcagatgttcctcaggacctgtcacaccttgttttgttttgtttgttttggttttgagacagtgtctctcactggcctagaactggattaagtagacaaggctggctagccagcaagctccagtgatctagctgtcttcctcgccagagctgagtgagattaaagcatggaccacgatgcccagctttttatgagcattgtggaaatcagacctaagttttcacgcttataacagcaagcactcaaagaaccaagccatctccccagcccctgtcttaagtcctgtatatttacttaagctttaccttaagaggcagactttctgcttctaccactaagggagcccaggagcagaaagtttaagaaactgcattaaagatgtgggacagcaacagtagtatttcaaagcctgtgtggagagaagttgaagcccttatactttcaactcctcgtggaaggtgaggaaagcaggatacacattcgcatttcactgtagtttcccacctgtcccagtcaggctaggcgctgtgtgtcttctggtgtagatggcaatcccacccccacccctgtccccttttgacaaaggtgggacctgaggctcataaacctgtggtaacttttattttcagcttacacaacccaaacttaacaccgttgatccatcttacccagtattgccaccccaaaacacctggtcagatgccggcagagttgttactgaacatgaggccaaaagtgaatgttttcttcataaaattagccatgcccaaaataccctccttgcaatatcacccatgcaaatctcagcacctttaccctgactcttattacaacatctagtgtctcctgaagggctcaactaaatctgttaaagattagtgctggtgttttttggttggttggggtttttttgtttgtttgttttttgttttgttttgttttttaagagttgaaagctctactgaagcaagctcttcattttgcacaagatttgagagccttatgtaataacccagagctatttacactaacattgtgcaagccgcaaactcttgagtaaattgcaggtccggtctcctggagaccggagaagataacttctcatccatactggtttgcccctcggaacatatacagggtgctgtaggcacacacccaggcagtaagcgatatataattaaggcaatatttggtcttttagtaattgtttctggcacagaaaatccgtttgggaaggaaaaattgcaaggccttatctttcttaggcaaatcacatttgttcaagacaaattatagatcctgtgaagggaaataacttaattacttaaaataaaatctaatttagctgtagggttttgcagcagcctatggatctggggtacttcatgcccgtgttcctattccacttgaggacacaattagattttcagtaggaaattatcttgagatttcttgccttcctctgggaagtcttaattggatcacgcttagacatacttttcgtagttttcgatgtgcacactggaaggcttggtctcgaagctgtggccattgtggcaggcttcactcggaatctgctctataaatatttattcgcagggagacaataggagaaaaccttgggaggaattctttctcttttctcatcttggcttgaaacctcctcaccccagattcctctcctttgccttggacccccaacaaaaggaacttagtctaaaccaaattcccagcactgtcagtctccatggatattgcagcctccctgggaacaaaggcagatagctccttctctaaaaaagaaaagaatttgtaaaaaaaaaaaaaaaaaaagtctttactccctccctcctccaaaaggagactccccagagtcattctctgtcccaactctctcatgacaaactcctccaaagccttccctgtgtcctggttggtctggcaatgtgaggaaacccagtctgcttgccagccctcacatgaagcaactgattgttccttgggctcctcccccatgaatggggctcttgaaggtcagtaatgtagctacaatcgtataatagaagctaaaatatttaaattgtatgcatgctgccaataatggcgtgaacatgacatctgacttacaagtgatgtcaggtctctaactgggcaggaacttgaaatgccactaggtgatctatctttcaggcccatgggcttcccagcctcctttcatgattatatttgtatgaacacatccattccagggtgctcttttagaagaaaatgggctttgttttagtaattgaaccaagtatctatagtttttctcccatctgatattcagatgctaaataaaagctccacaaacagttgggcattattgttccgtgtgatgctcatttaggagaaccaaggacccctggagacaaaattcaaattactacagaaagcagcccagcatccccacaatgctatgcttagaaatgtgctcttacaacctagcatcataagagtgcacacaactatcatggatagcctcttttgttagtcactgctaaagaacttccctagaagccataacaacattcccaagagtacaacctcagaggaacagtagtgttctggggccaaaagtaaagaaaatgaattctttaaatgaaatggtcctggagccatattgccctccaggtcacatactgatagcttctggacatcttctgagtgatcctattgaagagagcaggaaactggagctagaggccagacacattacttcatatcctataatgttcacaaaactatctgcctcaaagaactacctgacccagaatatcaattgtattccaacttcagaaaagcctttttaagggcagtaactctatcagtaaatcactcacaggggagggggtggagacagactgaaccacagcacttgatgggcagatgtcttggttagggttttactgctgtgaacagacaccatgaccaaggcagcatttataaggacaacatttaattggggctggcttacaggttcagaggttcagtctattatcatcaaggtgagaacatggcagcgtccaggcagtcatggtacaggaggagttgagagttctacatcttcatactgacttctagacaggtaggatgagggtcttaaggtccacacccacaatgacacacctactccaacaaggccacacctcctaatagtgccactccctgggacaagcatatataaaccagcatagcagccatttcctacttggtgggttcaggactaggagagaccctttctcaaaataaacaacaaaaaaatgtagatggcatctgaagaatgacagccatggttgtcttctgtcttacacacacacacacacacacacacacacacacacacacacacacgtgcacacatgaatacacatacagacacctgcacagtcatgcacaaatgctcacacacaaacacatgcatgtacacacacacactcacataaagaatccccttttagagttatggtgcttatgaaaataaagatatatataaccagtataatctgtgtttatataaataagtttattctagtgtgtgtgtgtgagagagagagagagagagagagagtaccatggctcgaatgtggaattcagaagacaacttaaaggagttgattgtctcctttcaacatgtgggcccctgggatgaaactcaagcttgccagctaggctacaagtgcctttacccactcagccatgttgccagccccaaaccagaataattccacaaaataacatgaatccatgaaggctcttgaatgatttgctcaaccaaaatccagaatttgaaatcctaccaccttaaggggatggctttgaagtgagacctctgggaagaggcaggtcatagaattcctgatccggagcaggagcggtgccctaggaacctagctagcctcgtagatcacagaggactcagctcaaagcccatcatctgtgaaccacaaagcaggcccttgccacataccgaatctgctagtaccttaatctccactttcccagcctcctgagaaagacgtttctgttgttgctaaggaatccaacctagtatacatgagagtttctgttatggattccaacttcttcctctagccttggctatttgggtttcattccagggcactgtgctccttccctgacattcccttctcacacaggcctagctgtccatcctaacactttgcaacacgtcctggttttcttcttttaagactagctgggaatgatgaggggccagcccattcttccaccaactgccatccatcgattcagagtcttttaaaccaaccctgttaagtcagacaattaannnnnnnnnnnnnnnnnnnnnnnnnnnnnnnnnnnnnnnnnnnnnnnnnnnnnnnnnnnnnnnnnnnnnnnnnnnnnnnnnnnnnnnnnnnnnnnnnnnnnnnnnnnnnnnnnnnnnnnnnnnnnnnnnnnnnnnnnnnnnnnnnnnnnnnnnnnnnnnnnnnnnnnnnnnnnnnnnnnnnnnnnnnnnnnnnnnnnnnnnnnnnnnnnnnnnnnnnnnnnnnnnnnnnnnnnnnnnnnnnnnnnnnnnnnnnnnnnnnnnnnnnnnnnnnnnnnnnnnnnnnnnnnnnnnnnnnnnnnnnnnnnnnnnnnnnnnnnnnnnnnnnnnnnnnnnnnnnnnnnnnnnnnnnnnnnnnnnnnnnnnnnnnnnnnnnnnnnnnnnnnnnnnnnnnnnnnnnnnnnnnnnnnnnnnnnnnnnnnnnnnnnnnnnnnnnnnnnnnnnnnnnnnnnnnnnnnnnnnnnnnnnnnnnnnnnnnnnnnnnnnnnnnnnnnnnnnnnnnnnnnnnnnnnnnnnnnnnnnnnnnnnnnnnnnnnnnnnnnnnnnnnnnnnnnnnnnnnnnnnnnnnnnnnnnnnnnnnnnnnnnnnnnnnnnnnnnnnnnnnnnnnnnnnnnnnnnnnnnnnnnnnnnnnnnnnnnnnntatgttttgagataggttctcatgtagcccagtctagcctcaagcagccaaggctaagctctccctcttaaataatggaattgtatctttgaaccacaatgcccccttgtaatgtgtgctgggaaccatacccaggcttttgtgcatactaggcaagcactgtcctgactgaatcacaccctagccttattaatccaagttaatttaccatttctttccagttctagttgatggcattaatggttaccaccacttaccagtgacatacaccaacgactttgattatttcatctttatagatgaaatccctccacacagtaggtattattaccgttgtatagacagagaagcagaatcatagaacgctgtctaaagctgacccaaagtcacatacttaatacatgctaaaacctggagttagacaaggcagtctaacctgcagcaagcctctcttcactttggggtctggttaattcctttgtgtcattcagtattcaaagaactggccatgaggtcaaataggtattttgtatgactggggggtgtggtgttgagaggggcaaaaggattgggtgttcgagaccagtctgtactacacaagattactgcctcaaaataataaaaacacccaaaaggtcatccattctcttttttatttttcaggtttaaacagtagacatttacctggtcctatttacactttaaaattcattttatttatttatttatttgtacaagtgtcttgcctgtgtctctatctgtgcacaacatacatgtacttccctcagaggccagaatagggtttcagatcccctgagagtatcgtatagacagctgtgagctaccacataggtactgggaattgaactcaggtcctctggaatagcagccagtgttactgctgagcaatctctctagcctccagttttacttttcaaagcaacaaagcagaacgtttagagatttttaaaatttagatttttcactgttgcttcttgtaattgcaatgggtttcaagttagcctagtgcactttgtctggcatatggtcagtgctcagtgatgcgatcgtcaatgaacatagggctgagtacgataggtctccactgtacgggcataccaatctccaggcgcactctgcaattagtgcttgcttgtgtgctccattctctttccctcagtcacctttcccaatcaatcatttatcgggtgctctattattgatcaacactctcaaccaggcaaatgtgaaagctgctcccagcagaaagggtaccctttagcggcctggacatgctggaaagttctctcagggattctcagactgacctgccttcaacattttaagaaaagaagtttccattcagctgtgatggtttatactcattgccaacttgacaaaatctaggatctctaggagacaaatctccagatgatgttacctgagatgggaagatcctacctaaatgtgggcagcaccatcccatgggctgggggcctggacttcataaagcagagaaagtgagttgagcatccatatccatctctctctgcttcctaactgcagatgggccatggtcgatggacagcctcaagctccacgtcttccttaccatgactgactgtatcccctggaactgtgagccaaaataaagccctcctcccttaagctgcttttttgtccaggaatttctgtcatagtaatgaaagaagaagtgaatatatcacttgcctttcaagtttcctactgcagtctgccctctgtatcctagccactagagcataggtatgaagatagtcttctaattctatgaggcctgtatccacagactcaagcaactgtgcgttttaaatatcccaacaggctggtgggatgcaaactgggtaaaggtgatgactgccaagcccagtgctctgagttcaatccccaggatccacttaatggaaggagtcctctgacttccacacatgtgtcacaccacacatgcatatatccatgaagaaatacatttaatagtaagttaaatattcagagaaaaaatgcattcttactgagtattttctgattttttcccttgtgtattcttccaaataatacagcataacagtcatctatatagcatttctattaaatgatgcactacaaggaaccccaaaatgatttacagttgaaaagaagatgtgtgtaggctaaaagtaggtattatatcaatctatatgagagacttgagtatccatggattaggaaacccatggaggatcccgaagccaaactccagttgatacacgagaaagactatcctctcagccttctgctctatgacagagggttggagccaggccagcttgttgggtgcactgagacaagctgatcccagacctgcttcctttctacttagccagtcctggggaagctggtcatgccttgaagataaggagcaggaattgtgccaagtcctgggatgtgggaactagcccctaagcagtgcttcatccctctgttcacaggaggcaacttgttaggaccctctgggactgaagaaggaaatggaggccatcactttgggccacagcccacttccttgaggctctatcagtctgagtaagcttttccatcttcagttcctaacgtatgaagtctgggacttgtgagcaaaagggtttgggaaagtcaaaagcagctattgtgcaagacaccactgttctctctgaaagggaatattacctctcaactaagtttgtgtcctaagtggtaagacctttacagcctgacatggtcaattaatataagaagctttcataatgctgttggctaacctctgctgtcatgacaagaagacatctaccagtgacaaataagtaactgggtatgggcctgctcctacaaaacctcatttatggaagctgaaacttgagtttcatagaattttcttgtcgtaaaatatgtttttcttttcactacttttcgtctttcaaaacaaaaagatacaaaaaccggactgggaagatgatttagtgagtggggtgctttctacacaaacacgagggaaccgaatttgggtctccagctgccacattaaaagtcagaggcaatgacatgtgcctatgattccagccccaggagagacacacagggagatcccttggtttgtgggccagccagtctagctaattggtgagctccaggctctgtgagagaccccagagagatgaagaacagtagaggaagacactcagtgtcaacctctgacctccaagtgctcaggcacagtcagtgtagccacacacgtatgtgcagacacagtgattcattgattgatgtttggttgatatttttaaatattaaaaaccagtccttgatcctaggctctgagcagcaggttctgcacgcaatcatccattgattcctgcttcagatcgtactttaaaaggcaacagaaactcaatacagtcaaacggagaagcagaactataaatataggtgagtttattctttaagttgaagggactcaagatcccctcaaaataatgactttccatgtataaggcactttggttttaggagacagcacagccggtaaagtgtttgccatgtcagcaaatgacctgagtcagaacacacatttaaaaaaaaaaaaaacagttttagtagcatgtatcagtaatccctggaagaagagacaggtagatagatctcttgggcttgatggtaggccagtctaacctacttgatgagtcccagaccagtgacagacttgtgagctcctgaggaatgtcaccgaaagttgacttctggcctccacatatacaggcacatacacaaaccacacacacacacacacatccccctacactcaaacacactggaatgtacacttacacacttctgtgtgtgcacacacacatatacacacacacaaacagaggcacacatatatacatacacacacacacacacactggaatgtacacttactcacttctgtgtgcgcacacacacacatacacacacacacacacacacacacacacacacacacactgaaatgtacacttatacatttatacacttctgtgtgtgggtgtgcacaaatgcttccacagagagaccctcaaggcaggtctgtgaaccagtttgctatgtccgcatgagaagacagttggctctttagccacatctgggcagctacatttctctcatgtcccagagtgctgtt

SEQ ID NO: 917 - DNA, 1080 bp, Mus musculus
atggaaccgatcagtgtgagtatatacacttctgataactactctgaagaagtggggtctggagactatgactccaacaaggaaccctgcttccgggatgaaaacgtccatttcaataggatcttcctgcccaccatctacttcatcatcttcttgactggcatagtcggcaatggattggtgatcctggtcatgggttaccagaagaagctaaggagcatgacggacaagtaccggctgcacctgtcagtggctgacctcctctttgtcatcacactccccttctgggcagttgatgccatggctgactggtactttgggaaatttttgtgtaaggctgtccatatcatctacactgtcaacctctacagcagcgttctcatcctggccttcatcagcctggaccggtacctcgctattgtccacgccaccaacagtcaaaggccaaggaaactgctggctgaaaaggcagtctatgtgggcgtctggatcccagccctcctcctgactatacctgacttcatctttgccgacgtcagccagggggacatcagtcagggggatgacaggtacatctgtgaccgcctttaccccgatagcctgtggatggtggtgtttcaattccagcatataatggtgggtctcatcctgcccggcatcgtcatcctctcctgttactgcatcatcatctctaagctgtcacactccaagggccaccagaagcgcaaggccctcaagacgacagtcatcctcatcctagctttctttgcctgctggctgccatattatgtggggatcagcatcgactccttcatccttttgggagtcatcaagcaaggatgtgacttcgagagcattgtgcacaagtggatctccatcacagaggccctcgccttcttccactgttgcctgaaccccatcctctatgccttcctcggggccaagttcaaaagctctgcccagcatgcactcaactccatgagcagaggctccagcctcaagatcctttccaaaggaaagcggggtggacactcttccgtctccacggagtcagaatcctccagttttcactccagctaa

SEQ ID NO: 918 - protein, 355 aa, Mus musculus
MEPISVSIYTSDNYSEEVGSGDYDSNKEPCFRDENVHFNRIFLPTIYFIIFLTGIVGNGLVILVMGYQKKLRSMTDKYRLHLSVADLLFVITLPFWAVDAMADWYFGKFLCKAVHIIYTVNKSVLILAFISLDRYLAIVHATNSQRPRKLLAEKAVYVGVWIPALLLTIPDFIFADVSQGDISQGDDRYICDRLYPDSLWMVVFQFQHIMVGLILPGIVILSCYCIIISKLSHSKGHQKRKALKTTVILILAFFACWLPYYVGISIDSFILLGVIKQGCDFESIVHKWISITEAFFHCCLNPILYAFLGAKFKSSAQHALNSMSRGSSLKILSKGKRGGHSSVSTESESSSFHSS

SEQ ID NO: 919 - DNA, 23943 bp, Homo sapiens
agtgctgggattacaggtgtgagccactgtgcccagcccaacttttaattaatgtcattctagtttacaaaatagccttatagattaccctagacagttctcacagcattcctgctacatacatagttaatgggattccctgatagctgcctcagagcgtgtggtgagctcctcgtcttacactgctgtctcatttgctgctcactgacatctccattactcccttaacaccaagtcgcgctcagagagacccatctactccagtttccagagtacagcctgctgctttacacgtccaagtctttgcccagatggttccctgggtagaatttttttttcgagtccttcaacctcttcacctccagaagccaggttttctggggagagaaccagagtagcaccacccaagggactctttggggtactcccctgggtggtgggggggggtccatcaccaggcagcctaagcctggcatgctggggctgcctcagcttctatggaaattctggaagatgacacagggggaccagggagattacagggcctgtgctactgcctcgggccggtgaaaaaacagacgcatctgcccccagcgcaccccaccccagcaacacacagaagggagagcttgcacagtaaaacccacttccctcgttagcttgctcgctaggagaagcagaggagagctgtttatacttacaacaaagtgggacagcaggagggtgggagagaaacttcagaccttgtactggctgagtttttcttatttctgattcttagggatgcttcacactcccccattttcagttctttcttctgcagaattaattcaagacagcctgttctgttcacagggggcacaaaggtatgggcccagagactgcagacaacaggtcagaaaaccacagcattctaagattctctctgactgaaggtggggataaaacagattttcaagaagaaaatgaagcatacagtttgaaaaatacagatcaaataacatactttttcacctttggaaaacaacttcatgttttcacaatacaaactattgaaagtaagtagagttcaataaacatctcttgattgttggagaatggtcagaagaaatatcttctgtatatttgtgcttcctagaaagagtctgatgaagtctcctgggacctgctagaaagcaggatcaattaaatgtttaggtttagcataaacaggcacaggaggtctttgtcttctgggaccagggagcccctctcactttcggggccagttgggtgacccgcagcacctgaactcctaggtagaaacctaaagagaaatccatggcagtgcctgagtagaatttcctctttctagaattgagggtgcagaacagcagcaggcaaatgacagaggagagagaaggcaaaacaaaaaattcagcagcgcaagagaactgggctttctagggtggttggttgtgatctcatgtgtgcgtgctcttgtgtgcacacgtgtgtgagaaaagttggcagaggaggctttggttgaaggagggagggtggttctttttttagcctggaaaattgccacactgggacaaaaaccttagcacagcccagatgggcgaaaggcaataggaaaaaaaaagccccctcagaaaggtaaccagctgcctgaaccctaaccctgaagtgaaaatctacctggccaagaacaaaaatcctcttcagtctggagaagcctaatctaaacctgcatgggggcgatgctcgccagtggagctagaatgcctgccatttatcacccaagataaaactctcagcaatcccctcatgcaaatggaaccctgtttgcggaaaggattaatccaaattgttccgcgttgttcaaagtgtctctgtggagttcgttctgtctcgtctgccccaaacaagcaataaattatccacacgtgagccaatttcccaaccaaaaagagacaatgtgggcagaagcggacttttgatgcccactccccgcaaggggctgccccacctgggctcaaaatagcaagcaggtcacggagggcagccctgggcacataggacaggagtaaacacagccaggagattatgctgcagctggttaaccacaaggataaacaagcggacaaagtagggagaaacccaaagcactccacttcagtatttttaaatgacactgaaagcaatttcatggcttccatttaaaaagaagctgctgagacacagaacatccccaatttacaaagattccaggaaacagcctgagcttgtgattggagggggttacgggggtgaacagactacatggaaatgctttctccaggcagccactggcacctgttaaaaagaagcccattcagacacacatcttcagacacatttccaagtattcattttaacctgcttttgcctaacataaaaccaagcaaagatgtggttaattgccttctttattaacctgcttccagagctgctgttaccccacattttctcaccaaggcaagtatatctggaagtctcaggaggccttaaaaaagtccagcactaaatcttctgagtcacttaatccccagctcttctatgtttggagataatttcctttatgaaaagaaactctaacctggccagatacccttctcagacttgctaatggaacaaagaagcctctcattagactcatccctgtggctgcagaaataagtgtctcggaaagcacagcttttgctttagcctcaggatggttttggctgccgcggtccttggcttcctctcatggcgtctcctccagtcaagctctagctaagttacacttagaggctagaaaacaggagagacaggtgcctagccaaaaaaaaaaaaaaggaagaaaaaaaaaggaccgtctagtgatcaggtttgcccggcagtgggatctgctcctttccaaagggtgggctgcccatcccaggagtgtccagagacaggaccacctgctgaaaaggagctccttccaatgcatggaacataatgagaccaaatggcattaaggacccctttcaaccccgaatctgagactgcaaagacaggaagggctttcaaggcacgtatgagaaattctttatgtcttctctttccttccctcattgcatagatctctcttctgaccacaattaaaagtaagaacacttcacactttatttaagactccacttccctttacctcatttcagtgggtaatggtggagaaagccatttgtctggttaagcaaagcccttgaccaacaagaaagacatttcagcagcagagataggaacctatattagtaataggttatgtttattaagcacttactaagtgccccacactgtactaaagtctttacatagatatcatattaatcttcccaataatccaaaaagtagaatgttattgttagccggatattaaaacaaatgatattacaacaaaggccactgtgtgagcagactccagtgctgtgctctgaaccacaaagctactctgtctggcttgcaatcctcctttctgctgttgttcccactgtttaaagagcagaaggaagaatgttcttctccctgaaggacgttgtcctataataactgaaagaaaagacaggcccagtgctcatgcatcaagacagtgaagaaggcatagggcctggggatgggaaaagggttgaggaatgtaaggatcacacaaagcttgtcaattctcttcagggtccctgacattaacctgagtgcggttaggtgccgcaagggaggactgacctggaaatcccaagtaactaatttcagtctcagagagacaaattatgacatagagaccaccccaaaaggattctgcagccagtttttgtccatgtgtgtctgttccatcctcccaagtctcctgactgcctaaccctatcctttcttttttttctttttttctttgttgaaacagagtgacactctggcatgcaggctgcagtgcagagatgcgatctcgactcactgcagcctctgcctcccaacctcaagtgatctccttgcctcagcctcctgagtagctgggactacagccaccacacttggctaatttttttgtacttttttggtagagacagggtttcaccatgttgcccatgctggtctcaaactcctgagctcaagtgatctgattggccttcctcagcctcccaaagtgctgggattacaggtgtgaaccacaatacctagtctcatactttcttttgatggctatcatcaacaccttaggtcagtgtaaactggaagactggaagctagtagagtttttgtgtttgtttgttttgaaccaacatttttaagttgagagatttcttattaaaaaatcaggactttcactttctctttaaaaaaagttgaataggctgggcgcagtggctcacacctgtaatcccagcactttgggaggtcgagatgggcggattacaaggtcaggagatcgagaccatcctggctaacacagtgaaaccccgtctctactaaaaatacaaaaagaattagctgggcgtggtggtgggtgcctgtagtcccagctacacaggaggctgaggcaggagaatggggtggacccaggaggcggagcttgcaatgagccgagattgtgccactgcactccagcctgggcaacagagcaagactccgtctcaaaaaaaaaaaaaaacaaaaaaagtgaataatatggcccaaattccctcaaagggcaatggagggtagtggttgctgctttaggacagggcatgcaccctttggttctccacagtccccaccagtccctattgcctcactcatttacaatacctgcaggtttttagatgttgtcactggtgtcttagacctacaagtagctctaagatcattcccaagttatttttttttaaggagactatttctcaaggggcatgtaattctaacagaaggttacaaatctcaaagacacagctttgatagctgacagatagctttagatttagaaaactcaagcaaaacattgtatggattcccctacacacacacatacacacacacgcacacacacacacacaagtaattcccaccctgttcttttgctaatataatattcttggaagaatgacctcagaaatatctcaaagcccatctgtatgggcgatcagatcaccacatttctgggagcaccaaggctctgccatgggatgcccagttctctttataaaacttgacagtccacagggctctaggtgcttcctctttttatatagctgtctgaggtcaccaccaataaattactggtttaaggaaaacaatgacaagcctattccatggaggacagggttcactcactcaattatttcctaaagcagtaccctccttcccagtttgacaccatgatttttgaggcaatagcaccgagcctgtttgctgctgttctttacacccataaagccacacaagcacctgccacaggagcacagcaaactttgtgaacagtcatcctcctggcagtggaactagtagagtaatgatcattgcactgttaattaagtggctgttttgtttaaatgacttaccaggatggctctaaattgcctatatttgtttactagtctagtttattctctttgtataggaaatttgttgactagtcttgactgctataaagcattgatggaaatcactaatcatcccattttagtgaaggcagaccttttcaacattcaagatacaacttaaatctagagtaaaaatggctctcccccaaaaaacagtaataatttcctaaattggtaaagaactgtaggatggaaggtttgggtttgttttcaaagtcacttttcatctgtaggtgttggagacagaaggatttagggaaggaggagagggcggggtgtggttaggcaagggacaatttgttccacctaacaccagcttggaaatagttgacatttgataccattgtctctttgagatttgtaaccctgtgttagaattacttgcgccttgagaaatagtctccgtttttgtttttttttttaatcacttaggaaaacattaactttctctaagtatcccttactactgtcaaggaagtttgcacttttttcctctttcagaaacaaaagcgatcaatttttttagagacaggagaggggccagcgaaggaaccagaagaccctgtgtattctgaaggcctttaatgcctcctgccatccacctcctcctggcacctcctcctttctctaacctcctgccatccaccactgggaaaaggtctgttcctaagctttctgcctagctaacatgaagccaatttagggacagagtacagcttttcatcacacacacacagatacacacactcacacacaaatcaaccagctgcagagcgagcaacaggaggtggcaggatgcttgccactgtgtcactggatttgtaagcatcccctccaaactgtggccaaggctagttattccctgggctaaagccaacctgagaagttggggaccctgccaaatccctgacagcccctaagcctgactctgttgccagagccacacaggaaagtcattcattcttttaagaaaggttcagtaaaagattaaggagcccagtatttgttcagcaatgggctagctggatagaggatatctgggcattcactttaaggaacctaaaatattggagggataggagtatgacatatactcatttaaaagttgagtaacatcacaagggatgccactcaaagcagtatgtacgtaaatgccaaatgacctgggcttcagagccagacagactgggtgcagatcctcattccggggtcacaggccagttcctcatctttccagaccctaatttctttaccatgtaataaaagtaatggcacctgccttgtagagttattgaggggattatatgaggtcagttgcacataacaagcgctcagtaaatgcttgagttttgtttgttttttaaagaacatcatagaatagttgagaataaggtttaggtagcccagtggaaatagaagtttaagattagcccattggaaaacaagccttccttgaaaggggaaaggactattgtgaaaaaagtctcacatcttagtagatactttagaagtggaaacatacatgaaggaggccttctgattccctttttgtcatacaatttgttggcttttttatgaatatgaaaatgattcatgtctattacagaaaatctggaaagcatagaaaaaccccaggaagaaagcaaaaatcaaatataattctgcaccaaggaaaacgcctataaacattttggttttcctccctatattttccaaatgcatattttaacataactgagatcacactatatacacaattctgaatcctgccttttgcacttaatgtttcataagtatttccccatgtcactaaaaattcttcacaaataacattcgcgatgtccatatggaatttcagatgtggatgaaccaaaatcttgtcaactattccactaacagtggttatttagggatgttcagacatttcactatttaaaaaaaaatgtttccacaaatacctttgtggcataagtttttatgagtggagttactgttctgaagttcctgctgaatagaaaatgctttccagtgaggctgtcccaagccacattcccatcagtgacaagcgagagacagctggtcttttcaaatccggagaccaaatattatctttgaaaaaaaatggatttttgcctaatttggtagtcaccaaatagcatctcattgttcttttaattatctgcttccttttagtagagatccctaaaaagatctgaaaggagtcttcagataaaggaaggagctttcttttgtctgtctacaatcaacaaatatttattatgcaaaccattttgctccgagttttctcctctttccctttttggacagatttgggagatctcacctttcaggttttagacatcgtgcagggaggagttttgaggtagggtgcagcttacggtccaggataaaacatactgattctgccactaccaggctttgtgaaaagcaagtcatgaaaacgctctgaaattctagaccttcagtagataggatctaccgtgtctataaaaatatgaagatccttaagttttattaaagattcgaaaaaagtaaaagtgtttttacggttttattttcatttttatttcttaccgttatcgtttattataaaggatattataaaggatacagatgaagagatacgtaatgcaaggcctgtgagaaggggcgtggagcttccgaaacctcttccagccaccaccctccaagaacctggagtttctttttttttttttaattctacaaatgtaatattagaattgattttatctggccattagtgtgtgtcctaactcgttcgtttctgagagtcccatctcccggcccggatatcatctttcctgtgtcagtgaaagtgcagagtagatgagaacctttaaccaccaacattagggaggggtcccagacaaagggggaaagtcatgctctgtagagaaaaggttccctgcctccgaactacctctggaacactccagactgaaatgtttcctcttttgatatagaaaagagggatcgtgtgtagagtgcagtctgggcaatccctctcctcgggaccatttcggggtgggggcctctggggtccgtgtcgcgacgcacgcgcctcggtcccagctatctccgcagcggccaccccgcctgcggacgcagtttctcggccccgccccacactcgctcccccgccccacccagtctccgcgccggagggaagtggcgcgagggggaaagcactgtctgcgcgcccactgcaaacctcagccagtctgagatcgctttaaacgtctgacccccacccccactccgccccgcccagttcttcaacctaatttctgattcgtgccaaagcttgtcctctgctcaaaatcgtggaagacgccgagtatggggaccgaagacctgggttcaagcccggcttggaatccctgcccatccctggcatttcatctctccgggcttatttgctggtttctccgaatgcgggccttgtctggttcacgctggatccccaacgcctagaacagtgcgtggcacgcagttcgtccttctataaatatcggactaaatgcatctctgtgatggtaatacccacacggtgttgtgagaatgaatgagtgattctgtgcaagttcctagtgatctgttacaaaaagtactggtcgctaaattactcttataataaagcatacttttaggataataaagcactattcgcgaattggttaccgctattatgaaattactgagcaatacatatctacatctgatcagtctccagaattatgccaaatcctaccttcttctgaaagtatctcctaattatctgcacctgaccctagtgatgctgtgaatgtgcaagtatagctacatcctccgaaggaaggatctttactccttttacctcctgaatgggctgcgtctgctgaaagcgcggggaatggcgttggaagcttggccctacttccagcattgccgcctactggttgggttactccagcaagtcactccccttccctgggcctcagtgtctctactgtagcattcccaggtctggaattccatccactttagcaaggatggacgcgccacagagagacgcgttcctagcccgcgcttcccacctgtcttcaggcgcatcccgcttccctcaaacttaggaaatgcctctgggaggtcctgtccggctccggactcactaccgaccacccgcaaacagcagggtcccctgggcttcccaagccgcgcacctctccgccccgcccctgcgccctccttcctcgcgtctgcccctctcccccaccccgccttctccctccccgccccagcggcgcatgcgccgcgctcggagcgtgtttttataaaagtccggccgcggccagaaacttcagtttgttggctgcggcagcaggtagcaaagtgacgccgagggcctgagtgctccagtagccaccgcatctggagaaccagcggttaccatggaggggatcagtgtaagtccagtttcaacctgctttgtcataaatgtacaaacgtttgaacttagagcgcagcccctctccgagcgggcagaagcggccaggacattggaggtacccgtactccaaaaaagggtcaccgaaaggagttttcttgaccatgcctatatagtgcgggtgggtggggggggagcaggattggaatctttttctctgtgagtcgaggagaaacgactggaaagagcgttccagtggctgcatgtgtctcccccttgagtcccgccgcgcgcggcggcttgcacgctgtttgcaaacgtaagaacattctgtgcacaagtgcagagaaggcgtgcgcgctgcctcgggactcagaccaccggtctcttccttggggaagcggggatgtcttggagcgagttacattgtctgaatttagaggcggagggcggcgtgcctgggctgagttcccaggaggagattgcgcccgctttaacttcggggttaagcgcctggtgactgttcttgacactgggtgcgtgtttgttaaactctgtgcggccgacggagctgtgccagtctcccagcacagtaggcagagggcgggagaggcgggtggacccaccgcgccgatcctctgaggggatcgagtggtggcagcagctaggagttgatccgcccgcgcgctttgggtttgagggggaaaccttcccgccgtccgaagcgcgcctcttccccacggccgcgagtgggtcctgcagttcgagagtttggggtcgtgcagaggtcagcggagtggtttgacctcccctttgacaccgcgcagctgccagccctgagatttgcgctccggggataggagcgggtacggggtgaggggcgggggcggttaagaccgcacctgggctgccaggtcgccgccgcgaagactggcaggtgcaagtggggaaaccgtttggctctctccgagtccagttgtgatgtttaaccgtcggtggtttccagaaaccttttgaaaccctcttgctagggagtttttggtttcctgcagcggcgcgcaattcaaagacgctcgcggcggagccgcccagtcgctccccagcaccctgtgggacagagcctggcgtgtcgcccagcggagcccctgcagcgctgcttgcgggcggttggcgtgggtgtagtgggcagccgcggcggcccggggctggacgacccggccccccgcgtgcccaccgcctggaggcttccagctgcccacctccggccgggttaactggatcagtggcggggtaatgggaagccacccgggagagtgaggaaatgaaacttggggcgaggaccacgggtgcagaccccgttaccttctccacccaggaaaatgccccgctccctaacgtcccaaacgcgccaagtgataaacacgaggatggcaagagacccacacaccggaggagcgcccgcttgggggaggaggtgccgtttgttcattttctgacactcccgcccaatataccccaagcaccgaagggccttcgttttaagaccgcattctctttacccactacaagttgcttgaagcccagaatggtttgtatttaggcaggcgtgggaaaattaagtttttgcgctttaggagaatgagtctttgcaacgcccccgccctccccccgtgatcctcccttctcccctcttccctccctgggcgaaaaacttcttacaaaaagttaatcactgcccctcctagcagcacccaccccaccccccacgccgcctgggagtggcctctttgtgtgtattttttttttcctcctaaggaaggttttttttcttccctctagtgggcggggcagaggagttagccaagatgtgactttgaaaccctcagcgtctcagtgcccttttgttctaaacaaagaattttgtaattggttctaccaaagaaggatataatgaagtcactatgggaaaagatggggaggagagttgtaggattctacattaattctcttgtgcccttagcccactacttcagaatttcctgaagaaagcaagcctgaattggttttttaaattgctttaaaaattttttttaactgggttaatgcttgctgaattggaagtgaatgtccattcctttgcctcttttgcagatatacacttcagataactacaccgaggaaatgggctcaggggactatgactccatgaaggaaccctgtttccgtgaagaaaatgctaatttcaataaaatcttcctgcccaccatctactccatcatcttcttaactggcattgtgggcaatggattggtcatcctggtcatgggttaccagaagaaactgagaagcatgacggacaagtacaggctgcacctgtcagtggccgacctcctctttgtcatcacgcttcccttctgggcagttgatgccgtggcaaactggtactttgggaacttcctatgcaaggcagtccatgtcatctacacagtcaacctctacagcagtgtcctcatcctggccttcatcagtctggaccgctacctggccatcgtccacgccaccaacagtcagaggccaaggaagctgttggctgaaaaggtggtctatgttggcgtctggatccctgccctcctgctgactattcccgacttcatctttgccaacgtcagtgaggcagatgacagatatatctgtgaccgcttctaccccaatgacttgtgggtggttgtgttccagtttcagcacatcatggttggccttatcctgcctggtattgtcatcctgtcctgctattgcattatcatctccaagctgtcacactccaagggccaccagaagcgcaaggccctcaagaccacagtcatcctcatcctggctttcttcgcctgttggctgccttactacattgggatcagcatcgactccttcatcctcctggaaatcatcaagcaagggtgtgagtttgagaacactgtgcacaagtggatttccatcaccgaggccctagctttcttccactgttgtctgaaccccatcctctatgctttccttggagccaaatttaaaacctctgcccagcacgcactcacctctgtgagcagagggtccagcctcaagatcctctccaaaggaaagcgaggtggacattcatctgtttccactgagtctgagtcttcaagttttcactccagctaacacagatgtaaaagacttttttttatacgataaataacttttttttaagttacacatttttcagatataaaagactgaccaatattgtacagtttttattgcttgttggatttttgtcttgtgtttctttagtttttgtgaagtttaattgacttatttatataaattttttttgtttcatattgatgtgtgtctaggcaggacctgtggccaagttcttagttgctgtatgtctcgtggtaggactgtagaaaagggaactgaacattccagagcgtgtagtgaatcacgtaaagctagaaatgatccccagctgtttatgcatagataatctctccattcccgtggaacgtttttcctgttcttaagacgtgattttgctgtagaagatggcacttataaccaaagcccaaagtggtatagaaatgctggtttttcagttttcaggagtgggttgatttcagcacctacagtgtacagtcttgtattaagttgttaataaaagtacatgttaaacttacttagtgttatgttctgatttctgttgacattcttttggctagtagaagacaaaagtaatacatttatggtatgcaaagcactatcctaggtatttcattgtaatattttacttaccccttatcacaactctgatagattctgcttctgttactaattacattttatagaagaggaaacggaggcacagaaagcctaagtaacttggttaaaggcatgtagtaagtatcaaatcctgtattttaaaccaggtaacatgacttaacgaatctgaagccttcaccactttaaattcaaatggaagtttagaaatggccagccagcacctatttgtatgaaaggtcatctttcagaggataagcatgtataaagaagaaaaggtatgcagtcgtgtttggattttactccaccatccacttgtgaaacccaggtctgtgcaatgccagacggtgtgtgctttcctcatccagtatcctcagtgtagataaccatcactcccttttcacagacaagagaactgagattcagagactttccatacattgcactttcaagggggcaaagccaagaactaattctgtttattgttccagctcttgctcttaactcttacctactattgcccttcagaacacctgggcataagtcaactgaactgctaataaagaaagccaaaagtgaatgttttcttcataaaattaaccatgaccaaaatactcctcttgtaatatcttctatgcaaatctcaacacttttattcttaaactatcgcaacacctagcacctcctcaaggactcagccaagcagctacaagttaatactgatatttgttagagtcagaaggaaggtccactgaagcaagctccctgttgctcacattttgcacaagattttggagacttatgtaaccacccgttgctattaacacgaccattgtgcaagccccaggctcttgagtaaatttcagctttggtttctatttaaagataatttctaaactctagccatacctacctcacattggaacacaaacagggtacactccaggcatgcactcagataataagtaggatataattacgacaatatttggtctacttttagtaattgtttctggcacagaaaatccattttggaggaaaaattgcaatgccttatctttctgaggcaaatcacatttgttcaaggcaaattatagatcctgtgaagggaaataacttaattacttaaaatagaatccaatttggctgtacatttttgctgccgtctatggatctggggtaattcaaagtggtattcatattctacttgaggacacaattagatttcagataggaaattatcttgaggtttcttggttttccctgagaagcctaattggatcacccttcatttaagcatagttttacatgcactctctcaaaggcttagtcttaaagccacaaccattgagacagacttcacttgaaccctctctataaatatttattctccgggagacaatagaagaaatccttggaaggcatgctttttctttctcatcttggcttgaaacctccttaccccagattcctctcctttaccgtggagtcacaacaaaaggaactgagccaaaacaaaattcccagtgtcaccagtcttaatggatatttcattctcccttggaacaaagatggaatagctttttttccaaaagaaaaacaagccttggctctctccctgccccaaaagggtgccccccacccccatcattctctgtcccaaccctgccatgttagagcgtctccaaagccttccctgtgtcgtggtttgtctgacaatgtggggaaacccagtctgctggccagcccttgcatgaagtagctgattgttccctctcctcatcccttatgaatggggcccttgaagttcagtcatgtagattcagttgtataatgaaagctaaaatatttaaattgtatgcatgctgccaataacagcatacatctgacatctaacttattaataacattaagcctgcaactaggggggaaagtggatgttttctcttgcaaagcctttgttttcctaaaatgacacttgaaaatttatctccccctactgcaggcttcccagcccccttttataattatgcttaaattaaaataatgattctgggatactcttttggggagataccctacaggctttattttaataattgaactaagtgtttgtgactttctcctagatattgtcaaatattaaataaaggctccataaacaattgagctgtcttattcccagataatacccatttaggaggggcaaggatccctggagacaaaatttagattactttggaaaataatcaaggcatccccgacacctagaaatgcagaaatgcaaccttgcagcctggcatcgtaggaatttgctccacccacgttgaggaagtctcacccatggctgccagtgtgacttagccagtcagtgctggagagatccgcaagcagccacagatagcattcccatggacacagcctcagagggaggctggtgccttaggggccgataaaatagttgaaatgaattctttaaacacaatggtcatcaaccgggggcaactggcccaacagggaacatttggtaaggtctggaaacatttggggtcatcatactgaggaagtagggggcgcggggaggagtagtagacaaggtgctagtggcatctagtggggaggggccagggatattgctagacatcctacaatacacaggacagcccccacaacaaaatgatctggcccaaaatgtcagtaatgctcaaagttgagaatcccttttttaaggtgatagtaataatcgaaataaggatatagccaaccagtataattctctgaaatagtatgaatccataaaaagcttggtatttgctatggtctgaatgtgtcctctcaaaattctcatgttgaaatcctaaccctcaaggtgatggtattaagagatagggtcttcgggagatgattaggtcataagcatgcagccctcacaatttgtaatgcctttataaaagagatcccagaaatctagctagccccttctgtcgtataaggaaacagctagaaggtgccatctatgaaccagaaagtgggccttcaccagacacaaaatttgctggtgtcttgatcttggacttccaagccttcagaactgtgagacataagtttatgttatttacatgccagccagtctatggtatttcattatagtagccagaaccgactaagacagtatcactggacagggttccagggtgagtctcacttcaatgcactctactcattcccaccttaccgaacccccacaattatcttctacattcatttcaatgttactttgtcatcgtgacatctttctctttgcctgttttcttctctcactggagtatcagcttctcaagggcagggacactgtcatttcttctttgttccctgatgagctgccacaggctgtgctaggaagccatcctacaaagaaaaataaatggtaaaatgctggggattctaattatcatcaaatatctgtctctctaaagccaacgatgtttactcatttaatcctcaccactgcctgtgactcaatttggaacacttcccatttttctccttttatttaaaaaatgagtgatgaggtaccagcctattgttccactgtctgaaactggcttggattaatttaaatcaattttatcaagtccaacaattaaaatcttctaaaaccttctgaaaatccttctttcaactgaaaattccagctggctgcaggctgagttgagggatccccaatgtgaagaagtcacagaagggacagagtttttcaaaatcaaacaaataaaggtgctcaaccaaactacaccaggtgctgtgtgtttatctggcagagccagtccactattaagttgatttacatattacagttcaattaaccagaacccaactcatcaacactcttaattaaagggaattacttcctcgtatttgactctgtctgaagaaaagtaatgtatattgaaattccaggcactctcatatgtaagatgcaagagtcccagcaatattgctagctccattttcaggcgagggcacaggcaaagtttaactacaaataaaggggttaatgttctttctactacacacactataaatgtgaaaacaggacaaccaatttctaggagatgtcctcacattctcaacatattcagtccaaacttccctatcttttctatttctaggtcaagtcctatgtgatagcaataacagttaacattgaccttgagggtttactacacaccaaggggctttgactatttaatcttcgtaacagccctacacagtaagtattattatttgcctattttacagatggggaaactgaagcatagaacaaagcttaaaattggcccaatgtcacatgttttataagtgataaagcctgggtttgaacccaggtcatctgacaccagagtgtgccttcctaagcactacaggaactttattatttgccttaatgttagccaatattcaggaaaataactatgaagtcaaaaacatccttcatgctcttcagtactcttcagggttgaagaccggacactcacctgattgtccttttgtaagtgacaaagcagacactgacattctagaaagatttgcactatttgtggttgaaataaaatgggtttcaagttaacttgatacactgtgcctggcgtatagtaggagcttcatattttgtggaataagcaaatgaatcaacacccataaattcctattcctgggagcacacaaaattctctaagtttttttgttgttgttgtcgttgttttttgagacagggtctcaactctgacagttaggctggagtgcagtggcgcaaacatggctcactgcagcctcgacctcctgggctcaagcaattctcccacttcagcctctggtgtatttgggaccacaggtgtgcaccaccaggctcgggttatttgttttgttttgttttgtagagacgggagtctcagcatcttacccagactggtctcaaactcctatactcaagtgatcctcccacctcagcctcccaaaacgctggaattacagccatgagccaccacacccggccctaagtattctgattaatgttcctgtgtatgacttgacttccttccttcgttccttcattctttcacagtcattcacttactgaatcatttactgaacaccactctggaccaggcaagtatgaaagctgctcacggtagagtggaagatgtagtcctttgatgttctagacatgctggaaaattagctaaagacctcgcagactttccaatgtccaacattttaagaaatccaagattccacccacccacccaattttccctcagtcttgctcccactcattccccatttaaggggtatcatatcccagcccacctcacgagctgggtgtcaggcccccaatcctgatcgtccttcctgctttaccagcccaaaggaagctgttcacgtcatgaagataagagcaaaagtcctgccaagccgtaggatatgggaaaaagccctggtggtagttttttggccttctgttcacagaagacaacttgttaggctcctgggattgaagaaggaaatcaagaccatcatcttggaccacatcccacttcctttggcaagcctactctgtttctatcagtccaagtgagcttttccatcctaaattcttagcacatgaagtctgagacatgggaagatcccacacataaaaggcttttgaaaagttaaaagaagctattgtaaatggcattatcttctttttaaatttgtaaacattgttttctcaacaaattcaatgtcttaagcaccaagacctttgcagtctaacatagttaattaatagatacttcatttgattaaaaaacaatcagattccataaggctgtgccaatgttggctaaaattatataaggttagctcagttgtttagaacttgaggtttccaaagccaaaatcaagggtgccagtccccctgggccatttttaaagtaagctatacctgaatgtaagctctgtgaatgtaaagactatgtaggtctgttttgttcatagctgtatttccagtgtctagaacattggtcccaagctttttctgtaaagggccaggtagcaaatactttaggctacctagagggccatgtagtttccagcacaaccactcaactctgccatggtaacaagaaaatgcataaaaaagtgagtgtggctgttgtgtcccaataaaattgtatctgtggacattgaaatttaaatttcatgaaattttcatgtgtcatgagatattctccttttgattttttttcaatcactaaaacatgtaaaaaccattctttgcttctctgctattaaaaacaaaaacaggtggcaggccagatctgacctgcaggctgtggtttaccaacccctggtctagaatatgcttaagcgatagtagaaattttataaaaatgaacaagtgaaactcgaaatataagaaagtttactctttaagcttcaggcactgaaagccccagagaactagtgactttattcacataaatgtgatacctaccacttataaggcacctttactattgacaaaatgctttcacaggtaaccctcaatgtgggtctgggtactggtttgccatattgcttggcaaaatcttgcttctttactgggtcttttattttagaaagaacaatctggggtaagagagttgcttttttttaatccacctttgtgcagctgtgtcactttcatctcccagagtgctgataaaggtggcatctccttctcttataactccctgaagctacagcagtgatgtctcactaatgaaagttgttgaggtgcgctgactaacctttgtctggtgtgagcaacatcagctttgctcctccaaagtgataatcaccaatcacaacttttggcagtgactacacagacagtccgtaaataggacaaaagaaaaagccataatccatggcaatgaatagtgtttcatggccacaagctgagccacaaaagcctaagaaaaatcaatggtgcagaaagcgtttttggacctgaccccagctcttgggggaaggaggataattctatttccttttagccttcaggtgcctcgtgggaatatcaaaactaatctccaaggggctgctctgttctgtctcttactagaaacatctccaagcaaattcattactttatagaacactcttcccaaggtgagaggcccagcttctgtttcagatgaaaagaatgtgagaagacgctgaggaaactgccaagtgctttctgtgtaaatgtgagttttctgctatatctggatgacagcacaaaagcggctgctcagttcccatggtccagagtaaaggaggacaaggcgtccaggctaaggtggccctggaaaaaaatccctagccagatggaaaccccatgcgtatggagtggaaaagaagaaagatgtgtggaaatagtaaataaaatcagaaaggactcaaagtaccccttcgcaaaagaggaaataaaactgataaacaaaaatatgaggaaatgttcatcctcactagcaaccaaataaatgaaaatcaaaataacaacacactgtttcttacttatcaaattagcacacatttttaaaataataacgtcccaagggccagagtagagagagccaagcacctctgagccctgctggtcagacataagctggccagacctttccaaagccaagggcaaacgtctccagagccgctacgctcatcccctttgatacagagagaccatttctagacacctaatttcaggaaactgatcctaaatcttaaaaatactctgtgtacaaagttgagtattacatttgtaataacaaaaaaaaaaaaaaactggcatttgcctaaacatctgacagcaaaatgagaatgaaacaaactatggtgaatctacagaatgaaatattatccagcttcttaatcaatgtttaaaaagaaaatgtttttaaacattcctccctttcctacaccttttaaaacaagccaccatgcacggccgattggcttgttttaaaaggtatacagaagggaggaaagtttgttagaaaatgtttacgatgtgtaaaatgaaagaggttcaatagtctgcgtatttttttaaaaagataaaatgttgtcagcagtagttaagtaataagctttggggcaattgtaaaatatttttttcttttgatttctccctattttccaaacttactataatgaatagtgaaaagataattggcttgggtttgttgttgtttgtttgttttttgagacagagtctcgctctgttgcccaggctggagggcagtggcaccatctcagctcactgcaacctctgcctcctgggttcaagcaattatcatgcctcagcttcccaagtagctgggattacaggcatgcaccaccatgcccagctattttttttttttttttttttttttttttagtagagatggggtttcaccatgttggtcaggctgatcttgaactcctgaccttcaaatgatccacccgccttgggctcccaaagtgctgggattacaggcgtgaactgattgagttgttttaaaaggtgtagggaagggaggaaagaagtctacaatccccatgctccttcctaggctataagtactccaagaaagaaccctcgtctcttccttttcctcttttaatcaactcaggacccaactaggcactagataaatgttgagttgaactgaaataggcatttgtaggatatctaaagaaaaaatcagacatacatatcaccctcaaggtacttagaatatagtagagtccatgtactgcataacaatgttttgatcaaagacaggccgcatatatgatagtggtcccataaaattataataccatgcatttactgtaccttttctatgtttatatgggttaagatacaaaaatacccttgtgctacagttgcctatggtattcagtacagtaccacactgtaagctttataccccaggagcaataggctgtacagcctaggtgtgtagtaggctgcaccatctggctttgtgtaagcacactctgtgatgtttgcacaatgacgaaatcgcctcaccacacattttccagaacacgtcctggtcactgaacaatacatgactatagtagggtttactagtagcagaaatcctaactatattatattcccagtagtgcctttgatgcagtctagcatttctgaactgaaggtcatgatctcaaggaagcattctagagaattcccaaagtataggagaatgcaattcagggctgtgtgtgagcagccacaggccagactgaacttatggcaagtgagcatatttcaaatcaatacatactcatggcaccatcttcacaagaccagcccgttaaggctttagtagaagcaatacagatctggggtttctcaaagcacttctcccagagaggtcaagtctttcaaaatccacaggaaagtaaatatactagaaagccctaacggaaatctctgaaagggttaggcattcacacatgacggcaatagtgtgggggcctgaaatgggaacaatgtgtaagtggtcaaccctaaatattccatttttgtattgtattagaaaggaaatgtcatgttggggaagaacttccttcattcgaataagtcctcagaatatagccgcacacaacaatggtggtttgcagcatgtcacatatgcaaggttccaaggtgggaaaagccagcgaaaaagaccaatgctcactttgtggagaggattctgcaagtctgttacttttattacttgagataggctcaggaatcagatcgaaaacagggactagaaaggaaaagctaacattttgcctatagttaaaatgaaattaatatattggccaggtgcagtggctcacgcctgtaatcccaatacttcgagaggccgaggtgggtggatcacctgaggtcaggagttcgagaccagcctggccaacatggcgaaaccctgtgtctactaaaaatacaaaaattaccaggcatgcttgcatgca

SEQ ID NO: 920 - DNA, 1811 bp, Homo sapiens
cagtttgttggctgcggcagcaggtagcaaagtgacgccgagggcctgagtgctccagtagccaccgcatctggagaaccagcggttaccatggaggggatcagtatatacacttcagataactacaccgaggaaatgggctcaggggactatgactccatgaaggaaccctgtttccgtgaagaaaatgctaatttcaataaaatcttcctgcccaccatctactccatcatcttcttaactggcattgtgggcaatggattggtcatcctggtcatgggttaccagaagaaactgagaagcatgacggacaagtacaggctgcacctgtcagtggccgacctcctctttgtcatcacgcttcccttctgggcagttgatgccgtggcaaactggtactttgggaacttcctatgcaaggcagtccatgtcatctacacagtcaacctctacagcagtgtcctcatcctggccttcatcagtctggaccgctacctggccatcgtccacgccaccaacagtcagaggccaaggaagctgttggctgaaaaggtggtctatgttggcgtctggatccctgccctcctgctgactattcccgacttcatctttgccaacgtcagtgaggcagatgacagatatatctgtgaccgcttctaccccaatgacttgtgggtggttgtgttccagtttcagcacatcatggttggccttatcctgcctggtattgtcatcctgtcctgctattgcattatcatctccaagctgtcacactccaagggccaccagaagcgcaaggccctcaagaccacagtcatcctcatcctggctttcttcgcctgttggctgccttactacattgggatcagcatcgactccttcatcctcctggaaatcatcaagcaagggtgtgagtttgagaacactgtgcacaagtggatttccatcaccgaggccctagctttcttccactgttgtctgaaccccatcctctatgctttccttggagccaaatttaaaacctctgcccagcacgcactcacctctgtgagcagagggtccagcctcaagatcctctccaaaggaaagcgaggtggacattcatctgtttccactgagtctgagtcttcaagttttcactccagctaacacagatgtaaaagacttttttttatacgataaataacttttttttaagttacacatttttcagatataaaagactgaccaatattgtacagtttttattgcttgttggatttttgtcttgtgtttctttagtttttgtgaagtttaattgacttatttatataaattttttttgtttcatattgatgtgtgtctaggcaggacctgtggccaagttcttagttgctgtatgtctcgtggtaggactgtagaaaagggaactgaacattccagagcgtgtagtgaatcacgtaaagctagaaatgatccccagctgtttatgcatagataatctctccattcccgtggaacgtttttcctgttcttaagacgtgattttgctgtagaagatggcacttataaccaaagcccaaagtggtatagaaatgctggtttttcagttttcaggagtgggttgatttcagcacctacagtgtacagtcttgtattaagttgttaataaaagtacatgttaaacttacttagtgttatgttctgatttctgttgacattcttttggctagtagaagacaaaagtaatacatttatggtatgcaaagcactatcctaggtatttcattgtaatattttacttaccccttatcacaactctgatagattct

SEQ ID NO: 921 - protein, 348 aa, Homo sapiens
MEGISIYTSDNYTEEMGSGDYDSMKEPCFREENANFNKIFLPTIYSIIFLTGIVGNGLVILVMGYQKKLRSMTDKYRLHLSVADLLFVITLPFWAVDAVANWYFGNFLCKAVHVIYTVNKSVLILAFISLDRYLAIVHATNSQRPRKLLAEKVVYVGVWIPALLLTIPDFIFANVSEADDRYICDRFYPNDLWVVVFQFQHIMVGLILPGIVILSCYCIIISKLSHSKGHQKRKALKTTVILILAFFACWLPYYIGISIDSFILLEIIKQGCEFENTVHKWISITEAFFHCCLNPILYAFLGAKFKTSAQHALTSVSRGSSLKILSKGKRGGHSSVSTESESSSFHSS

SEQ ID NO: 922 - DNA, 39414 bp, Mus musculus
  misc_feature (1)...(39414): n = A,T,C or G
acctttccctgagcacctgcacaacagcctgtaaggttaagctcagccatcagtcgctttctccagaggtctgtgctgagctcccagcctgggacagcattttggaagaaagtactatattaagatttttctctttttctcctcctctcaccccgaaccccagcctagcctagctttggatctctctaagtaaccgaggatggctccgaactcccaatcttcttgcctccgaatttccagtgccaggattatgggtgtgtggattatctggcccatctttatttttctttttctcttcaaaatcgtacctatctctgaagctagattgcctactttttaaactatgtggctttcgtatgttagtttgtacctcagtttcctgctctgtaaaatggaatagcaccaccccccacccccagtattttgtgagacttaaatgggttaatgtgattgaaagaataagaaaaccacccagtttatcacacatgtgttcaataggagtttattattacgggactgaattcataatctatattcgatgataataatccatactgttcttgacaaggacctgagtttgcactagcaactcactttggggcaggtgctcattaccacctctaactccagctccagggaacctgacgtcctcttctggtctcagagtatactggcactcatgtgaacatgccagacttaacacatgcacgtaattaaaaaaataagaatcctaaaaaaattaaaacgatgttttatattactacatttgtatcatttataagcaaatactcatatgttggaaacatgtgccctggaagtgtgttttacggctaggagtacttgatcctgtgagtttggagactgggtcctgaagcaaagacgaagactgatgtctttatcctcagagcctagtcctgtcagcggaaaagattcacattggcaaatgcagcatgccgccaaaacaggcagaacccgaggtttattctggctgggatttggtctcttagggattattttattttatttttttaaatttccacttctaaaaggctaggttttaattagacaaaggcaaagagacatcttacaatcccaggctggatttagggtgaggtgcgccctcttgtgacctaatagcatatttctctttctgcgcactagctccgtttgtttcagctccttaggatagaatggctgatgtggaggtctcacaggtccctgcaaaagtgtctttccactttcagacgcaaacactctatccaacacactcagcccactcagccctccttacggtgtcaatgtttacccaagtccttagcttcttcttcatgaaatgtcaggcagcaagcaatgtaacttctggggttttaggatttcaaattccagccttggtacttactgtgcatatgattttgagcaggctaatttatttatatctctaagcttccatccttttcataaaatggggtaacagtaccaacctcacagagcttcgggaacaattgaacaaggtgtactaatgtaacctgttaataccagcacactacatacgctaagtaaatcactgatatattaagcaatgaatcagaagccgggtggcagtggtgcagannnnnnnnnnnnnnnnnnnnnnnnnnnnnnnnnnnnnnnnnnnnnnnnnnnnnnnnnnnnnnnnnnnnnnnnnnnnnnnnnnnnnnnnnnnnnnnnnnnnnnnnnnnnnnnnnnnnnnnnnnnnnnnnnnnnnnnnnnnnnnnnnnnnnnnnnnnnnnnnnnnnnnnnnnnnnnnnnnnnnnnnnnnnnnnnnnnnnnnnnnnnnnnnnnnnnnnnnnnnnnnnnnnnnnnnnnnnnnnnnnnnnnnnnnnnnnnnnnnnnnnnnnnnnnnnnnnnnnnnnnaaatccgcctgcctctgcctccctgtgctgggtattaaaggcgtgcgccaccactacccggctagaatataatttctagctaaggaatttgaagtgagttactaaaactaagatgtagaattcccctaaatgcaacactagctgatgtagtgagccctttcccaatgcttgctactgtcaaatttgctcaagtttcatgggtttcaatagaaataatagccagtagtcgttcaaccttatgaacgccaggagggagacaagctcttcacaaactttgcatatttttttcccaacaacactcaaaggaagatttcagtattattacacccattctccagacgaggaaactgaagccatagcagtttaggggagtatcttagtttgggatttccattgctataaagagacaccatacaccaaggcaacttttataaaggacaacctttaattggggctggcttacaggttcagaggttcagtccattatcatcatgtctggaagcatggcagcatccaggcaggcatggcgctggaggagctgagaattcttttttttttaaaagatttattttattaatatatgtaagtacactgtagctgtcttcagacactccaggagagggcgtcagatcttgttgtggatggttgtgagccaccatgtggttgctgggatttgaactctggacctttggaggagcagtcgggtactcttacccactgagccatctcaccagcccggagctgagaattctacaccttgttctgaaggcaaacagaagactctttccaggcagctaggaagagtgtcttaaagcccacccccacagtgacacacttcctccaacaaggccacacctcctcatagtgccactccctgggccaaggatattcaagtcaccacagggaggtagcacaattgataaggtacctgccacatacatgttcaataagggtctcagttcaggtcctcagcattcatataaaagccaggagtgtcagtgccataggtaacgcctgtactggcaagtgggatggggaggcagagacaggtagattcccagagctcatgggttagctaacctagctggatccttcagttcagtaagagaccctcactctagtaatcagggtggagaatgctccataaagggcattcattttgacctcaggcctccacaggcacgtgcacctgcatgcacagtgcatctatccacacaaatatgtttacaaaagaggcgtttggagtttgctggagcctttgcagctagggagtatcaaggcatggatcccacattgaaagcaagtggctgcactccatgttttacctacatattatctttaatctcccaggaacctaccctgagatggaggttttgttctgtcacctaaattttacagctgaaaaaaaaaaaaaaaagacaatcgtgatggagttgtttgtttgttcaaggacatacagatgggatgtatgaattggggtttggatctatggctggctgacccacatttccagcttcctattagatggctcatacctcaagagtatttacagtgtttatcatagggtttctattgctatgacaaaacgcagtgaccaaagcaacttggggaagaacgggtttattcggtttacacttccccgttgtaatctgtcactggagggagccaggataggaactcccacaaagcaggaacctggaggcaggagctgatgcaggggccatggaggaaacgctgcttactggcttgctcagtctgctttcttacagaaccctagaccaccggcccaggggtagccccacccacaattgcctgagccctccactatcaatcattacgagaaagtcccgcaagttcgcccatagtccctcttatgaaggcatcttcttcacggaatctctcttttctctgatgactcaagctcgtgtcaagttcgcatgaaactagccaggaccgtggaacaaagcaactaagtattacactaagattattcagctacagggattaacgtgtttctgacacccagggattcaaactccgtaagactaatttacataaaaatggctagtatctgctatctatagttggatcctggatccgaattaacagttctaggtttattgcctcactgatgcctcacataaacctgtcacatgaatgctattattcttacttcacaagtgaagaggtgagatatagaactctgccaaaccactcaactaagttgtgaatttgtgaatttgaaattgtagttacaacagacaaactctctcttgcccaatagatggtcactgtattcaccctctttcctttttttattatttttccctactctctccagctcaacccagggggccccacgcttcttcagtagaccccgaccccacgcccttctaatctagactccacccagtaggcggcaccgtcaccgcagaaccaatggaagagaatagtatcgagctacacccccccaggcattggccctgcaagatttgttccggtaccagagcgcctgagaagatgaggcactcattggctgacgtcatctgagaggcggccgatagaggagtggccaccggtgctcgcgcgttgccttttgggagttgtggtctcagagatcgggttccagggctggcggcgctgggactatgcgtcccagcatcccctgcaagagcccgggagcacttccggcctgttgagaagtgggtgtctctgtgggtgagtctgggtggcggatggggtgcagttgagaatcaggcgctgggctggaggctttggaggtggtggtacccgcgggggaggggagctgggaaggtgagaggggaaagcaagcatcgtggcgtgtgtgtgtgtgtgtgtgtgtgtgtgtgtgtgtgtgtgtgtgtgtcggggcgggagtgcgggcgggcagaggctgcagcgtgtggagatgggcagggtcaccgaggggtcgggatgaagagtgagttggagaggcgggcagtgagacgggtcttaccgaggtctgtgggtaaggtggtagagatgcgttttggctgtgaggggaagttaccttagggtctagaaaagcacaatcaagggaagagagaactcaagggccctggcaaagaagtgaagaggccctgagcggaaagtctgaccttaaaatagtgcttcattctcgacacctgcgttcatgtcatctgtgacgggactggctattgtgttcaatcccaaacctgtacttctttcctcataactgatagaagtgaaaggcatctttatctactgacccgcccaccctcgactgacccgcccacccctgctgacccgcccactgacctacttgttttaccagctgattccacctgcgcctgcattcttcttcatccacgccgtttgctgtacactgttcgaggcttgccatttctttagtatctcttaaaatgacctctgtcttccgggagcctctgcagaagtgtccacattttcatttctccaactcggagaaacattgcagctagtgtgatctgttgaaaccctcaactctataccttccgtttgttctccagcttggaatccatccctggcatgcaacacgtgttgaatggaatctgatctagtagattcttcataatgctctttgcagcccacttttcccatactgcacgctccggggctgccaaggtgtttcccattctccaggtgggccattttgcttctctactatttcatagcctgcctctctgctgtaacctccctcccccattctctctgcgttgtactcaagaaccaaatcaacagttccttaagcaaattgccacctccaacttcccagctcccaaatcacactttctttatgacattggattaatataattatctgtgacttttaaatttattaattatcattattattatttgtctcttccactagatagcttcatcagggcaggcagtgtctggatcatctccattttctttggtccagcccagaacagcagacatctaatgtagatccagcaaatgagtaaagacttggtgaatgtgggctaaagactctcagggggagctttgttagaccacgtttgaaaatggctatggacttccagggctgtgagcttcaatcttcttcctgacatcgatatctgctgggagctgaggttgttgggggcttaaggacagtgttggccaacacatagggatgcatacagcggcttcctttacctgaggcctggcagccattgctaattgatcacaacatatatccatatggagctcatttctcagcagactcctctaggtagcttcccccatgatggaggatggtcggctaagtgaggcctatctgccacccccagttccagtccttagatgcgagtctcccctcttacagccatagattgcatagttagcccagtaggactgacaaccattgggagctcccagctgcttagaggatcccaaccaatctggtcctctctgtggaccaagggagcatcttctctcctcctctgttgtcacaggagtgggtggaggggggggggaacttagctccgcattcacatccagtacccagttgccaaggccccgctcagcttccctgtggtaaagtggaacaacttaaaaaaaaaaggtttttgtttttttgtttttaaattaaatgtgagaattttatacagtgaattctggtggccctgattttgattgagtaccctttcatcatttggggactctgcacccctcctaagtctttctgggaactggaagtgaaacctttgtgatttatttattcagacttctgtctggaataatgctgtaggaaagacacgctgcttccattcagtgccaagaaaggctcacaaaaagaaaagcaggcggggagtagcggagacatgaggagtagcaccacaagaggagacatagtggcagcccacgtggggtgaagtccctcacgtgtctgaagcaattctggccgttgccagcatgtgaactctagaggtctggtttctcttggagaagactgaagaaccggggacgtcctgggctcgccgtcctcttagggctccacgatgggtcacagtccctgcccgtatttactttttccgtttcaggctcgctgcctgcttattctattcttgtttcacaagttagcctgtgataagagctgggtaggacaggaggctgtctgacctgcacggtgtgacacagcagctaagaggcagaagtctcactcttccatggatgttcttgtctgtctcccgtggcatgattctagcaggtaggaggatgtgacgggattacggaaaatggtgggagactaacttgggcctaggtcctagctcagacacttggtgggtttaggactttttctcccccctctctcttttcccccctctccctaccttctctctttgagaagttctgtttctctctatacatcatagcttgggagtcctttgttaaggactcagtgagcactcagtcttggcataagctcaggttttctagtgtgaccacgaggcagaagaattggagacagcccgtttccattctggtcttcctgggtcatgggtgttataggtcagtgacggtccctctacttctttgtctggaggattctgtgcaaatctagatggagaatgtttaggactgtacttagtgcggataaaaggcacctcttggaggcctcggtgtatctctggaggcctcagggctggagaatgctcttgccacgctcctgactgacagtgtggacctcccttcccccaccgtagtctaggccatatggatagatcgatatatgattctgacaagggtttcttccatttgtttgaaatgaacttttgaggtttttcggatctctctcccccagaagatgtcctcggctctggcttggtgactggtggcgtcattgcctggcgggtgtctcctttatgcaggagtgtaggagtctttgcttgccaacttactgtctgttcctagactgtaactttgtgaaggctgaagggactttctgtcccagccactgttggatctgtagctcccggtacagtgcagggcatatggtgggtattctgtgaatgcctgacaggttactccttgtgtatgacagtgacagattgtgtgtttggattagtgtgttgggaaaatgtgtgttaaaaaaagttatgaaacattaattcttcaatataaatcatggacattctagacttttgatgtaacagatttacatatttaatacaagacaacaaaatctctaatggcactggtatttgttgtctatgaggctgggtcccatactggcctggtatacctcagtgcagtggcactgtccattgtaggggtgggtggctgcaaaccatgggtgagcatttatctcagagccatgtatcagctgctttgggaggagcagggatggtggccgggcatgatagagcacaccaaggaatgcctggaggaagtgacatgtagccacatgtagcagagggatagccagaagtagcccggtggccctgtgttctctaagcatcttcctacgtacatggaagtctttttggccagtctctatctttttgtttttgcttttgttttttgagacagggtttctctttgtagccctggctgtcctggaactcactctgtagaccaggctggcctggaactcagaaatccgcctgtctctgcctcccaagtgctgggattaaagcgtgcgtcaccacgcccggcttcagtctctatcttttgttacccttgcctctacccatcctagtcagatggcccagaataccagatgctgccatcctttgcctctggtcctgctgtgccattcctacttggatgcagccagtggcctcctgttgggtgtgtcttatgccattagactttcgacgactagcttgttttctaagagaacccagtatgggtgtcatcagagaggctgtacctccataggtgccaacgtgcacgtgtctccacagagtgtaataaaagatagtgccacgggaaggtgggagtcggggagagaggaatctttttgatgtgggcaggccaccagttgtcctttggctagtgtgctccggtcctcatgagctcacaacatcactgtctgctttgttttctccatgcactgagtactgtgctagagccttcagaagctgtggtctgggcactgtggttattacaatagggtgatcatggttgcaagggagagcatgagatgccacaaaagctggtgaccaaggacaagtcttgtatcagggagcatgtagtttttgtggagcttgccacaaaagatggcaactaggattttattgtttatttgctttatgtatgtatgtatgtatttatttattttttgctattgtagctcaagctggtcttaaacttagaatcttcctgcctcggccccctgattgctggggaaggtacatttggttttgacccattgaatatgaggtatctagaggacagtcaagtggaaatgttggagccatgagctatgcagacagctttggctggagtttcgagaaacttcaatttagagatggtgaatgatatctggtgtgtggggtgactggagagtgagggggggattttgccagatgaccatccctagacgaggaccaaggctcaagtttcagaaggcaggtctcatggaaaaggtgaccctcttggggtccggctttggggaaggttggctttggaacctggtgtagaagggaggaaggccacactagggtcaaagcccagaggtccagggttcttggattaaacatttaggcatgtcccaaaagatgtagcatggtgctgtcttcttgtaaagggaactgggtgctgacattggtgcctgatcacggtctcacttcctgccctttgcaaagcagtgtctcagagaagcctcagagacacttccacagacttccacagaggttgtggaagttatgagagaggcgaaggaagcagtgttcctgggtcctctccctcaccgtgccctttgtctttctaccttcacagtcttggggagctgtccccgccaacccccaggagccccttgaaggacacattgtcaatgcaggaagcagccagatgagacagctccgctgaagtgaagcacccgggccagatgatggctgtggcctcacctccgccagagccggaagacctcctgattgtgaagctggaggaggactcgtggggatcagactccagacccgagaaggagagccacagccccgtccctggccccgaggtttcccgccggtgtttcaggcagttccgataccgggatgcagctggaccccatgaggccttcagccagctctgggcgctctgctgtcgttggctgagacctgagcttcgcctcaaagaacagatcctggaactgttggtgctggagcagttcctgtccatcttacccagggaggtgcagacctgggtgcaggcacgacaccccgagagcggagaggaggcggtggccctggtggaggattggcaccgagaggcctgggctgccggacagcaggtgaggctaatagtctgatctctaagaagctggctaggcaagatagcgggcctgaggttgagttaataattgcccccaaattgccataatagccatcattgagcacctaccgtttcctgagccctgccgtgtagcaggtagtattccaaccgtttgacttgcttaattcatttaattctgccacagattaataaggtgggtcggtactattagcctaattttactagtgaggaagtggaggcaaagaacggatagataatttgttcaaaatcaccagctactggattatagaggcaagatttgcacttggcaaggcctgacaatggtgtgtgcctagccaccattgagactgcctccctgtaccattcagtgtgcctcctctgtattatactggatgttcaacccagtcatcacccgtaccgggatctctttggatgcttacagcagcccatagacagaaatagttttaccttctccattttgcagtgtaaggttctaagactcagagggttcatggaggtcacttggaaatggaaccagagcctaaacgccccatctctgggtttcaaggtcatgcatgccttttctactacagaactagcgcctcatctgcaaatgtgccgttcaaatgcctccaagggtgaggctcaggtgagcacccacggtgcttcaggccctgttctgagcctctcacatgtgcacctcattcagtcagccactgggtgctgtctttcaagtgagctaacagcaaggtaagtaacttgtctgaatttgtgagtggtagagcggaaaaggggaggggccttacggatcccacctctggagcttcagcagtttccaagcagctctcagagcctatgatgtcatgtgtcattttcctatggcccagaattaggatcctgcttgccgctgccttgtagagtcagcccctgtagccggcttcaggctaaggggccctttcggaacttgcacctcaaacccttttggctctgcacttgttacagtcaggaatccccatggcctcgtactcgaccacacttggttgtgaggattctgtgtttgagaatacgtatgctgtgaatgacaaggttctctgtccatttaaactgtaaagctctgtacagatgagagagtcaggagagggagggccaaggttggtggctctgctcctgggctccttacaaactgacaggaagctgtcatttcccatcagagcacatgcctcttagtagacatccccgctccctccaccaccttcccacacctatgttctgtctttcaagaagccttaagaaacaatggaagccttgggacttgacctgagtgggggacgtgagagaggggggacgtgagacccctgagatgggggacgtgagacccctgagatgggggacgtgagacccctgagatgggggacgtgagacccctgagatgggggacgtgagacccctgagatgaggactgacttaaggtgttttcaatgctccatctgtgaaatgagaaggcagacgaggctagtttttcaagtgatacccctgtgaggtggccaaaggttgaacccctctaaaatagagagaagacataaaacaatggtgttctctctggtcccccttgtccatgacctccacttttactctccagcttctctgcctgctcctgggtcctcacgtagtggtacacaggggagcgcctcccttcttcagtgcatgcgccacacctcgtagcctgtgctgcaatcctctctgagtcttcgtcctcctctctggaggcaaaacccaattcttcatgagaggatgaaatttatgagcctcaccctgtggtcagtgccttcattcagggctaaaaccctcaaagggatctttgagtaccactgtcttacaatctttagcttatttcgtctggaaccccactcttcatcaggtattctgatgaagtgttcattatttgaaccgagtttttaggttcaaaattgagcagtgagtatggtgttctcagatgtagtctccatcacggtcatcatcccctatcagagtagagcggtcattaccccagtgagcccccaccaacatcatcacccctcagcgtgtgcatgccacactgagcctcactgctggaggtatgcgtcgtatggattttggcaggcacatgaagacatgtgtctgctattagggtgtctcacgtagtcgcctaactccctcaacggtcctgtgtgttctgtgtactgattcctttccctcctaatgtctagtaaccattcatctttctactgtcatgtagagcggcccttccctgaatgccacagaggtggagccacacagtctgtgatctttgtgcttaggctttttttcttttcttactaagtgatgcatgcttagtgttcttccatggcttgagaattgcttttcttttgagcactgaattctgttctgttgtctgggatgtaccagttcctccagtccagacagaaggatgtcttggttgtgtctctgttggcagatatgattgacagcactgtaagtgtcacatgtatgttttttgtgtacacataagttttcaggccatttgggtaaaactgaaggattgcgttgttggatcacatggcaaagggatgtttttgtcttataagaaactgttggagctggtgatggtggcgcatgcctttaatcccagcacttgggagacagaggcaggtggatttctgagtttctgagttcgaggccagcctggtctacaaagtgagttccaggacagccagggctatacagagaaaccctgtctggaaaaactaaaaaaaaaaaaaaaaaaaaaaagaaactgttggactgttttggaacgtggccctactattctccatcttccgttttgctggcagtgagcatgagtttctgtggttttgtgtttggatgccaggcattctggtagttgtgaagtggtctcacattttaatttgtcatttcttatatgtgttgatgggtacacatgtgggcgagtttgtatgcacatgttagaggccacaggttgatgtcaggggtctacctcaatagtttcttattagttagttctgagtggttacttactgagcctgttgtttactgattggctagagttgctggatagtgagctccagggatcctcctgcagcctcctcccttgggctgggatgacaggtgcacactgtttttacctgggtgctgggaatctgaacttaggtccttatcctgctgtggcaagcactttacttactgagccttcttcctactacccaatttcttaatgattataaataccttgtcgtatgcttggttggcatctataagtctttggtgaggagtctgggttattttggtccttttgcctctccttataagctaagaatggatgttaaacaaagatctaacaaaaattctcaataaaatacttacaaaacaaattcagaacacatcaaaaataccatctaccacagtcaggccagctacatcccagagacagagggatggctcaacagtaaataaatgtagtcttgcacataaattgatttaagagcagaaaacacaggatcatctatctcatatgcagaagaggcctttgtggaactccaacatcccttcataataagagttctagagaatgggacaggggacatatctcaacataataatgggtataatacaagcccacagccaacatcaaactaaatggaatattttcactgaaatcaggaataagacaagacaaacatatctcctctttcctttcctggtcaatatagtggttgtattcttagctagagcagtaagacaggagagagataagcaaataggaaaggaaaaggtcaaaatgtctaattcatagctggtaaatacattaaaaaaactattaggataaaaaaggacaaaaatcagcttcctatatgcaaacagcaaacactagaaagaaatcagggaatcattattcacaattaccacccccccccaaaaaagaccaacaaccttggaataaatttaatcaagaaactgaaaaacttgtacaatgaaaactttaagacaatgaagaaattgaagaacataccagaagatggaaagaccgtccatgctcattgcttggtagggttaatattgtgaaaatggtcattatactgaaagcaatctacagattcaataaagtcctcatcaaaagcccaacacagttcttcatagaaataggaaaaaaaaatcttaaatttatatggaaacacaaaagacccaggatagctaaaaccatgctgactaataaaacactggagatttgcacttctgctttcagattatactacagagatatagtcataaaaccagcatggttctggaattcaagcccacacatttgataagtgggacagaaatgaggacctggataaaaagcccacacttctacagccacctgattttgacagagaagcaaaaaagtacacactggggaaaagacagctgtctcagtcactgtttgattgctgtgcaaagataccacgaccaaggcaacttgtaaagggaagctacagtgtcagagggctcttccatgaccatcatgggtaggaagcaaggtggtgtgtaggcatggtgctggagcagcagctaagagcttacatcctgatctgcaggatggaggcagagagacaatgaagctgtggcaaaggatatttgatcacattgtgaaccccaagactgtgaactgtaaaaaccctgtttctaattgtggtgtggtatagctcagcctttgatcctagagctctctgcttactgtggacaagtgcttgtggtgcggctcagccctagcacacacctgtaagccaagagctacataaaatcaaccctaggtcaaggggcagagctagtaaccagcccacggggaatgaacataagcaaactgaaccaagagtcttttgaattgaagggcatttaaaacagtgtggagaaggagagctttttccttctgggaggtcagtggggtaggaaggttggctgggttctttctccgcctctctgagctagcctgcgttcaccacggtatctggctcccgaggcttcatttggcaaaatcgaatggctgggattttttaattaacaacaagactgggcccactgtgggcttttaaaaccttaaagctcatctccccatgatatatcttctccaacaaagccatacctcctactgcttcttgaacagtccaccaactgggaaccagacatgcaaatatatgagcctatggggctgttctcatttgaaacaccacaatagcatcagcagcacatggtgatggttgaaccggatagcttgcatgtagaagaaagagctagatctctcactctacacaaaactcaagtccacatggatcaaggacctcagcataaggcctgataacttgagtctgtcagaggggaaagtgggggtgggtcggggggggtatgctgtctgcatcacaggcattacgattaacatttgacaaacgggacctcatgaaactaaagagcttctgtacagccaaggacatcatcatctgagtgaagaaacagcctataggacggggacaaaaccgtaaggttatacatctgagagagggttagtatgtagacttgacagcaaacaaaacgaaacaaaacaaaacaactccacaaaaccctagacatcaaatagacaaaacccaattaaaatccggaacatggaactatacaaagaattctcaaaggtttctacacaagtgctcgtctaaaaagttctctctaaagagtcctctctgctctctcctgctcgggctctttgcctctcctgctctgatgtgatgaccgtagtgccgtgactcccagtgctatgccctcacctctaagttcttcttgagttcagttctgactctttgtcctcagcacttcaacgtctttcagagtacgtgatcacatggtaaaagttcacaagtttacacataaattcaagccatgaatcggataagacgtttacaacacagaatgtttacatgcatacctggctaaacagccaccatctgtcaccagctctacaggttcatggagagttaaccataatatttgtgactgaggtattagtgaagttttgtatagataaacccagtcagtattttatcttctgtccttgcaccttagttccctttttaggaccttcagttaattgttttacaacctattggaatgtgctctaaggtgtagacgcctgcttgctatctcagaagcaattgactcatggcacttgaaggctggcagagttctcgttgcagtttggacatcagaaaggacttaatagcagtcctagtataaaagagcttggtgattactaatataattttaggaattcttatagggtcatcattaagaatttgtctacatagcatctatatagcatcactacaagacagtacacctttagtgttctgcagagatctgttcaaaagggtgagctaatacttagtgattgttatatatatttaataataacaggaaaagtatattaatagcaggaatctttcctaaaatgaaattcttctcggccttgcctagagaaacagttccatcattaactttcacagtccacggcagaaccatctcagcaagattacctgctagttgttagcttctccttgatggctccgggcaaagtgcgaattagaacggttttgagattttaccttaccccagtcaggatagttaagaataaaacagcagcagcaacaacaacagcaacaacaacaacggcaatggcaacaacagcagcagcaacagctgacaacctatagtggtgtggacatgggggcaggggagcacttctgacttttagcagaagtgtaactggtccagcccctgtgggaatcacagcggagggatcccacaaagctagcaacagatctgtcctgtgatccagcgatgccattcctcagcataccctgctgcagagagctgctttctcatccacattcattttgctttatgcacaattcagataatggaaacagcctggacgcccttctgctgatgataatggagaatgaaaatgtgcatagatagagtggaatgttatttaactgatagaaaaatgaattatggaattcacagataatggttggggctgtaattaattactctgagtgatgtaacccagacccagaaagacaaatgctgcctattccctcttatgtgtgaatgttagctttgacaatttagatgtgtgttcattttattttattttatttttgtgggctgacagtgtccgagacagggtttctctgtgtagccctggctgtcctggaactcactctgtagactacactggcctgaaactcagaaatccacctgcctctgcctcccaattgctgggaggtatgtactaccattgtctggcttagatgcatatttaaattagagtgcccacagaaatcaggagagtagtaagggaccctggggtattagttactttctggtattatgacagaataccatgaccaaaagcaacttggggaggttcaagttcgtagttcagcccgtaatccatcatcaagggaagtcagggcaggaagtcaagcaggagctgaagccagaaccacggcagaatgctgcttccccgctcgccctctctggcttgctcagccagctttcttatacaacccaggccaacctacctagtaatggcactgcctagagtgggctagcacccttccacatcgactagcctaggggaaatggcctcccccagttgagactccctcagatagatctgggatatgtcaagttgacagnnnnnnnnnnnnnnnnnnnnnnnnnnnnnnnnnnnnnnnnnnnnnnnnggatatgtcaagttgacaggtgaaggtgaatgagagaagggagaatctcgtagggaagggtagaatacagatgtcatgaagagggaaagaaaataatggggaaaagggggttaaagggatgagggagggcaaggtggagcagggagtgtggggaaggaaaataataggacctttgtatatgccatatggaaaagtaccactgtgcaagctttttaaaacacacacacacacacacacacacacacacacacacacacacacacagaggaatggactgactctacaaaagaagcaatgcttttcccaggtcccaggctatcaaataaaaagcctttttctagatatgggttacctcttgagctggtcagtgggagtccacaaacattagaggctacagccattgcccctggtggcccctccagaacttaatgggaaggccctgttgctgacgacaccacatacttgaactgtagcacagagagaaatcaagctggcaccagcctgggagcttcacccccactggctagctttcatggtggcatgaagtttgacaagtggcctgaccagatctcccggctggtacgatgttggtgggaatgttatgcggatgagatggcctggttggatttgagacctgctccataagatggtactcatgtttgcgctgttaactaggctaaaaccccactgacgaggtcgcaggccttagcggagagccaaatactattattctgctaaatggacatagtattaaactgccccctaaattcttaccttattcccatggattgctgcatcttctgtcatgagagaaactacccttgcagtaggtgtggattaaagcagagattcacagctggttatcatgcagagtaagagactggagtactcagctctgactgggccgtctctcccatacaacctcccttgagggtcagggagcatcataaaacagagacagaaaatgtataagagatacagggagtagatgcctgcagtgaaagattctttggtgggcatgacaaggctgctccactcatgaactcggtggtaggagctgaacctggtcttctggaagagcagcgcgtgctcgcagctgcggagccgtctctccagtcctgtgttctggatacagcactggtaactcacttccaagctctgcaactctccctgcatcccgagggcttttatctaattatctatctatctatctatctatctatattatcttaagttgtattttcatgtaatttaaagtaatttctcttgaaatttcttccttgactcaaatatttacttgtatattgtttgagctccaagtatcatggattttccagctacctttctgtttctgagtcacttccatgtgatccgaggagcccacttgtcacgatcctgccctttgacattcgcttagtgtgttttgtggcctggcatgtggttgccgtggcaatgaatggtccatgagggcagatcttgtactccttcgttagaagttctaccttgcagaattcagccatccctctgctgttctgtcccactagtgagtctacaccgctcatcgctctcttcccttcaactgactttggttttgtctgttccaagagctgtgctgacgtcactgactgtactcaccctcttctgcttctgtcagttttggactgtgttattagaagtatggaggatcaaggtgtgtgcagtccttacctggatgagaattatcatgcctttgtggagtgtcaaacccctgtatcatatcatgaagccactcttcagccctgggaacttctcttgctctgaagtctcctgttctgaaattaatacagcttctcttactccacccctcttcatgtgcatgtgtatggtgtgcatgcatgtttgcatgtatgttagggtgtgcttatatgtgtgtgcatgtgtgtgtgcacacatgtgcatgtgtgtgcacatgtgtgtgtgcacgagtgtgcatgtgtgtgtgggtgtttggaggcttgaggttgatgccaggattcatctttaatcactcttctaccttactcattgaggcgggcggagtctcagtcagaccgagagatcacggatgtggctagtcttactagccagcttgctcttgggatccccagtctctgccttctaaagctggcactacagacaggcctccatgattaccctgtatttacatgggctctggggtcggaagtttgacctgaactgcttgtgtgtcaagaactttaaccactgagaacttccggcccacttccttttggttagggttaagttggtatctcttacttcctcctttgccttttatctgtaaggtgtctctatatttaaagtggatttcttagttacagcatatatttgggtcatattttatacactcttggccttttacttggtttgtttatttatctttgagatagggtcttatagtataatccagcctgctcccaaacttgcaatcctcctgccttagcttcccaactgctgggattgcagatgagaatcaccatgccagctagttagtgtgtttagaccgttggcacctgggttactatttttaagttttatggtttgataatcccagctctctgccatctgacactggttcatgctgattgctcttcaaaatgttgcttgccttccggtatgccttgaaagttttggttaaaaggtggcatatgatgtcttgggtggaaggagctatgtaagtaagtcttttagaatacagtggcagagcatgtctagtgggcagtctacagctctgtgctctggactctgaaattcatcagtatttctcaggcttccctttgtgggtggggcaggctgctagaaagggcttcaggcaggcactcctgtcacctgtgcagaatagtagggaaacagaaggggcagctcctttatgtaaagtaggctatgctccggcactcactgttcacagagtacactggtgtgtttcacagtggttcctgtccctactccaccccatcctgcagaatcatgaggggactttcctgcgcattcccctcattacgaggatggatagagctcttggaagtgacactcggtaaagctcacctgcccttgtcttggtgactgggtttcctggagcctgactctcaggtggcctgccctgtgcctctagctgtagggctttcctgccagcactggtcccttcagaggtctccgctccagtgaagtcacctctcttacttctccagcttcgagggcaggcctaggtggtgtggcctcgcttctctgatggatctaagagctttgagtcttgctcggcttgggtttgtccagctcacttctcgatgaggtggagcgatgatgtctaagctccttcctagattagaaacttgagacgatcctcatggttgtctcattcctcgtcattgtcagttgaatctgcctttcttccgtgttggcagttctggcccaaggggttgaagtctccgttgtagcatggtatcagctggaggagctggctagagtgaggattgtcttagagtttatccatgcagcttctttgttgattgtaactacttcagaggcaagcaggcttataaatatgcttatcagttatttttaaggtcacaacattttatgtaatttacttctgtgaagcaagagcattttgaatagtgttcacctgctttagatacttgtgtagcctcccagaattccacaagacagaactcatttcgtagtggagatagacctcgttcggtagcacagacagaattcatatggtagtataaatgctgatttgtttcctgaagtcagtctgatagttttcttactgtgttaaaaccctctttggatcctaagaatctgttaaccccatggaacacgttcacactcaaggtaacagtcctgtcccattgaggggaccacaccgatctgatggttgattttgtgtagggactggagctatgctctgaagactccaggtccttcgaagcagttcaggagttccagaggttccagctgcagccagtgacccacggctctgagggccagccccgaaaacagtgggtggagaatgcatgtcccgacctttccaagatgccacctgagtccttgaaagagagtggtaagtaccaaggatatggggatagaagagagtgaggcttttcttcccaagggatgggcttgggggtggggtggggagaaaggacatacagaattcaaggtacacagtgggataaatgttggatggatgctgttattgagccaaaggttgagaagctctgtgagatgggagcaagacccgctggctggagtcatacagaaggcgctggcgtggcagtgggctgggtgctgctcacaagatggggaagggtacctcacacctgggacataactgaaaacggcttaggagtcccagcttctaaaggaagtgaaatggcaagtgcgtgccgggtgtggggcacccttggtgtgattcccagcatgacctttgggaagctgcgtctcagaaggaagtggttttagagaaccaaagcttttatctcacggattgctctcttcttcagctgtcctcacaccccaagccccaactgttccaaagatggcgagcattggagattgggaggtggcaggcaagtcccaggtaaactactgttttcttttcatgtcatcctcttcctgtgccctgcccctaactcatggcctccctagcaaagggagagagcataggctgttagcccttggcccctgggcctgctgctaattcattgacagggatgctggccccacatcacagtctgtggtgttagaagctgtagtgagctctcttaggcctggtcaggttcccaggggggttttaaagtgtcattgatatttaaggtcctctgtgtatgtgtcataggaaactccgagccccagtagacaagccaagaaggagccctgccaggaccccgcaggaggtgatcgtggggacagtgcgtgcctgggtaaggaaagctctgggtaactctgtcctggggtccagctggcctgtttctggcacactcagttccaagagaggggttgccacacgcccagaacccgagctctgccctctctggactttcaggggaggaagaagactggctccttgtagccacccatgtagagagtctgcaggttgggatgggggctgcatgctgttacctggagccagccctgctggactcatcacctcagtcagtcaccttagtccggaactggcccaggctctctgtctcaaaagttcagcacccactgagaactccccttgcgggcagactcctgcaaactgaggtcatgagaaaagcgagtagcaagggcttctaaatgctcaaagctcatgtgaccagcacacctttctctgaaggccaacgctaaagggtctgtccccagaagggagggagggagggagttcccaaaagacttgagtagacagttctcctggcccctgttacccctgctttgtgtctgaacttaaaaccaaaagacttgtgaagaggaagaaagnnnnnnnnnnnnnnnnnnnnggagggagggagggagggagacacacaaatggggtagaatagaaaggtttcaacagagtaacttgtgaaaggttaagatagatggctgagggctgcctactggacagtgggaccccaatagtgcttgctaattgaactgatcaagaaatgctgaattagagtaccccaaaaaggctttacatcaaaattcgttatctagatcacctcaaacatgtactatgatgaaaggctttctgctttgttaggaccaggcgctgctgggaaggtcttcctgtagaccagctacatttttaggatgaggacgtcctagaggatgcgatgttccaggcatgctacctgttagctcagcaatgctctagggctctacattcattcattcattctctctctctctctctctctctctctttctgtctttttgtctgtctgtctctgtgtctctgtctctctctgtctctgtcagtctctgtgtttgtttctgtctgtctctatgtctctgtctctctccctcccttcttctctctctccctccctccctgcctccctgcctccctccctccctctctctccctcgcttgccttctctctccttccctccaacagtgagttgagtctgatggggatttttgaggtcctgtgtgttttcttagccacgctgttgtgtgatgtatttcataacaacagcatggcagatgaagagccggcaggtccctttcatttttggtgatggtcctgtgtcttctaagcacccctctctaggaagatcatcacgggagtttctaattggcctcttggaggagaaggatgtgggtttcaggaacagtttagataaacacagtccgacagggttgtttctgctcaggcgtttctgtccttccttttgtgcaggagttccagcttcaaagccaagtgccacctcccagcaagagcaaggaccggagatttggggtctgagccttataaattctgggaatgggagtgctgcagacgatagcctggacagtgcgcaagacaagccagtgcaggcagtggcccaggcagactcaagggcctggggagagccgtgccaatggggtgcggaggacatgaaggtgtcaggtgttcactggggctatgaggaaaccaagactttcctggccatcttaagtgagtctcctttctctgaaaagctccagacctgtcaccagaaccgccaggtataccgggctatcgcagagcgactgagggcacggggcttcttgcggactctggagcagtgtcgctacagggtcaaaaaccttctccggaactaccggaaagccaagaacagccatccgccagggacctgccccttctatgaggagctggaggcccttgtgagggctcggacagccatcagaagaacctcaggtgggccaggagaggcagtggcactccccaggctgggtgacagcgacactgagatggatgaccaagacgaagggagctgggagcccgaggagaccgtggaagactgcagtggttctggcctggccgccgaggagtctcttcaggggcccaggattgcagggggcccagctctgctccagagccgtattggtaagaacatggcatttaactagatgaatatcagccaggctgctgcctcgtgaggttagagctcagcctgtgagtcagtaagacgccaagtacctgggccctcctcagactcactcttctctgcaccacgtctcttagttataggaacaaataactctgaagccttgccagaccgggagagattccagttgcttccaaagggtgtcgctgaggacactccgaggtggtacccgagtgatcttgtcatttccgtaggcgtgtttctcataatgcgggtgagaatggccaattaattcacagatagcaagtcttgggtaagaaagtgtgtgaaatactggcgtatagagaagaaagtgacagtgtagccttgagagtcactatgtggcaaacacctgatactgcaaagggaaagtctgtgacagccatctgaggctttggaagccacattggcaggaacagagcctggtctcctgcctggagttcatgtagcccctcccccactccacctccttgggttatgccgcttacccgaatggagactaaactgtggccctgcccgtggaccagtgaggaaagcttttccttagtcatagtctgtgccctggtcactgaagtccattgatgtctctgatccttgtggattctcaggttccaaatattgttgaagagaggattcacaaaggagacaggggatgcgtttagagtgactgcagggagaatgtcatggatgataccatttgtcagctgaagccacggggtgggtcacttgatgcagttgctaaaagcatggccagtcggcctctccttcagcaagactgtctcttgaaatggtgagagaggatgccttggccggcttccctagcatgtctcttgagtttgtgttgccaggtgcttggacagtctctgagatctgtgttctggatctgtagaagtgcaggtgaccccagtcctaatgacctaggtaaagctcctaagcctcacatgtctgaactcttcacttctgacagcaggcgtgcactggggcttcgaagagaccaaggtctttctggcaattctcagtgagtcccccttcgccgaaaagcttcgcacctgtcaccaaaacagccagatataccgggccatcgctgaacggctgcgtgcgctgggtttcctgcggacgctggaacaatgccgctaccgattcaagaaccttcttcgaagctacaggaaagccaagagcagctgtccaccaggaacctgcccgttctatgaggagatggactcactgatgagggctcggactgtgatcagagccgtggagatggtaggagaagccacaggcctccctggatctgggcagagcagtactgaggctgatgaccaagaggcctggggtgagatggaagatgaggacgccgttagacttctgactccagactcccagcctgcagatgcaggtgaggctggagccattgggtgttggcagaatctgcagccctgtacaaagatgggagctgaaaggaccaggatgggcacaggacacaccaagaccaagttctcagcacagaggagatttatttgccccagagggacagagggcagggagtaagaaacaaagacaggagatagaggatgaaggagagggtaaagaaacaaggtggggtaggggcagggcagggtggggcgggctgggggggacaagtggtattttcccaggaggaacaaaggactgcctctggatagagaggagacagatgtggcccacaggcaaatggtttataaagtacaaggggaaaccccatgtcaggataaggtatttaattttaattgggcatgttaattagatgagccaaagggagcttttgattgctggacttcaatactttgaacctttgaaccaatactggaccttagtggtcagcctcaggaggagaaagtggccaaataacagactagaccttggaggccagctttagggatgtcatggaacagtttagcaaggcagaaggagtgagagagggtcacggcctccaagccaggtttgccaggctcgagtctactagaaccaggcatatcatcttcgtctctgagccaaagaatggatgcgatccaacaggaaaagcctgtgcactgtgtagacgctgtcatacgttgtcatctgtttaagtgtcagcctgcattctgggtggctggtctagcttttactgggacacacctgggtaactatggaactgattgttgacacggggtctgcttaatgtgctggatgacgagaagagctgtttattattgaatacagacttcagaggaatgcctggggaggaaagccaggctgcgtggtcactagggtggggttactgcattctagactgatgggtggaggggagagccaggcttcatggtggctggggtggtgggtggggttactatatccagactgttcatcagcgtttcagggctagaagcacatgcttacacaaaaacttgacagcttttgcgctagtcacatttataagctgtgggctatcatatataaatctgttagccagatcgagagaatacatggtataggtgtggtagcggtaaccagcgaatgaaccgagaccttccgtttgtctgtcctttcaggatttgagttgaagcgtgaggaagaagaccagatttcagagcaggatgttttgggggatttgcctggcgccttatcaagatataccaccaaagccgtttgccagccttgtgactggggggaggaccatgtgaacggaaatgaaggggagtggaggaacacatgggaagagtgctcctctgaggaggacttagaaaaactcattgaccaccaaggcctgtacctcacagagaaaccctacggatgtgacacacgtgccaaaagcttcagtcggaaagtgcatttctttgccccgcagcggacccattcaagtgagaaaccctacaagtgtcttggctctgggaagagttttagtgaccgtgccaacctcagtacccaccagagaatccatattggagagaagccgtacagatgcctggagtgtgggaagagcttcaatgacccctctaacctcatcacccaccagagaacccacacaggggaaaagccctataaatgtgggctgtgttggaaaagctttaaccagagctcaaacctgctgaaacatcagcgggtccacttgggaggacctcccaaccagcgggatgagcccggggagaactttggccaaagtctatcatacagtgctcactggagacgaaattctacacaggagggacctaaagaacctcagaatatcagcatgggtgccgactctcctggagcctgtcaccccaactccggggagaagctgtactcgtgccctgagtgtggaaggtgcttctctaagagctctgccctcacgagtcaccaaaggatccacagtggcgagaagccgtatgagtgtgccgtgtgcgggaagagtttcagcaagagctccagcctggctaaccaccgacggactcacaccggcgagaagccgcacaagtgtgcggactgcgggaagtgcttcagcgagcgttccaagctcatcacccaccagagggtccacacgggagagaagccctacgaatgccccgagtgtggcaagttcttccgagaccgctccaacctcatcacccaccagaggattcacacgggagagaagccgtacgagtgcagagagtgcgggaagtgcttcaaccagagctccagcctcatcattcaccagcggattcacacgggcgagaaaccctacaagtgcacagaatgcggcaaagacttcaacaacagctcccacttcagcgcccaccgcagaacccacgcgggagggaaagcgttgtaggcaacacctcctcctcctcctgacagaagcaataatgtgtatctatgcctctcaagttcctaaaacactctagaaagaaaccttccgatgtttaagcttgctgtaaatctagaggtgccatctttgtaaaatccgggtaatttggaagtgaatttcagtgactaaggtttgaaggtacttccaagtgtaatttggtttgcacacgcccaatacacacatagaatccttacgatgtctttacaaatgctgtcacttgagaacttagtctgaggcagatgggtgatattggggttagagttgaatccgtggcccagcatactgattcctgtttctttctgtgccttcgctacccttcccacggaaaccagttcttgttcttcttggtagtttgcagttggagcaaatcctcacagggaaaaccttgaaaactcacagtgagaggaggtgtagactgggaactagtgcctggggtaccccatcttgaggtcagcagcaagtggggccacagcgagatcattgcagaatcattactaatagaaatagctgttcattgaacatttgctctttggcagcctgtgtgccaagcgccttatgtaacatctcatttaatcctcaaagtagtcccagcgtagaaaatggaggaggcacaattcatcaagacttgtgtgtccccagagcctgaggggctgggtgctctcctgagtcctcttacatgagggcattaatgaactctctgtcttttacaagtacagaagttgagagttcctgcaggtgagaggatttgggacgttcagaagtggtgaggtgctctgtgtgaggctgagttgttaccagagcaatgggtctgagtcaccatctttatagagtcatacgggtgagagaggtaggtagatggagacagtgtgacttgcagcgagatcgtgctttggctaagaagtgggttgaagagtcctttctcaggtcagtcctgcttctctgtacctgtggctgggcacaggtgaccatgtcttcccaaactcaacttccctgtgctcagtctcgcctgccttttggtctctctggctcagtttcttcatttccaatcccgatgcctgaggtagaaggagctgaaacattgtcctttactgagagggcttgaaaagggttccatgttctaggttcatgacacccttttagcttgagtcctcttgtcctaagctgccctatatggtctcttagaccagccactcccacaacaggctacggcagggaggcccatacacagtgcttttcttgtttgtagcactttggcctccatagtttttcttagggtttaaaaacattgaataaggactttgactttcatagatttttaaaggaaggtgactttcttacgtctatgtgtgaccttagagtgccacttgtatcccagttacttcagggctctggaagtattgatcagagaatagctgtgaagaactttgaagactggaacgttctatttgtatgtgagaaagtaggtggaagctcttgattgctgtcccctctaaaggaggtcactccctagccttcttctaggaaccggaagccccttcccaggaacgagtccactggaggctactttctgtcaactctcttcagcttacctttcctggctcatcttatctctgaggatcaggggtcatggggtgagccctggttaaagatcagcaaatgtcagttattgcagtaagaagatacgtaggataccctgggtctgaaaggaagggtcctgagggagagaagaacattctagagaaagttaccaaggtatgaaagacctgggttctaggtgaaggtagaggcccaggtttgtatcctggggtaagggactgggatggtgggagggtggcatctgggattgcacaggtgctgggacaaggtcattctgggtgcagcaatgccttcagctctttcttttcagaagttggaagctcagctgggtgggcccttaatggtgctaatctctatcgattccagcctcacattcagcacatgccttagttgtaattaaattgcctagtgctttttttctctccaaactgaacattttgtatttctttctgtctcacttgcagtttttgattgcagacccacataagagttattggtactaactatgccacaggcacattactacactgttttgaaatactccttaaaaaaaaaaggttcattacttttaaatttagctttgggcaaattcttagagcacaggcagaaggcagccagattatttgccagaatgtcacacaaacggtctcatatcccagtccctaatactttgtttccttctgaatcctcaggagctgggccctcacagtctgcatttccctcagtactactattgtcctgactcttactgttgtggcccattaagctttgcttatagcatcccatcctaaacacaaagcagagagaacaaactggaattgagtgagactataagcaatcaaagcaccaccctcccccctcctgtgatatacctttcccagcaaggctgtgcttcctaaaggttccatcaactcccaaacagcactgccactgagggtcagggattcaaatactacctgagcttacggggaacatttctcattcaaaccatcatcgtcatgtgtggatggagcctaaatggcaggctcagggtgatgtgttcagatgtgcattgtcaaagtctaacagctgattggagcttaaatgtgttgctgtctggctgaatggtaatattgcagttagaagaggtaaggatgtgaatggctacagtggttctgtggagggagaagatacctttctagggtttcagaggaaaacttaagaagagcagaggaaagcaaagggcctttcatgcctggatgaagcatccatgattccaaggggacaggatgtagagacagaaaagcagaatatgtaggcttagtctgtgacaatttgaactgggggttcctaatggacctttgagtaacaattcatttgtatgtttgagcctgaagttgggtgatagaatatgtctagagagttatatatgtgggtatggaggcaaactcacaagcaagggattatactcaaagtcaaagcagtattgtgcttaagacagaactggagaagcacggaaatgtgaagggagatccctcaaggcaatgaggaccactccccagctgactcttgtcatctttttgacactgcctcccttgtttgctaacctctggcttcttagaataatcttgtgctttctggaagttttactgtggaggactgagctccctgaggaggtgaaatggttgccgagactgttctttcctttgctgttgggactgtgctagtgcctcttgctttcagtcatggctgttggaactgtgctggtgtctcttatttgcagtcatggctgttgggactgtgctagtgtctcttgtttgcagtcatggctgttgggactgtgctagtgtctcttgctttcagtgatggctgttgggactgtgctagtgtctcttgctttcagtgatggctgttgggactgtgctagtgtctcatgtttgcagtcatggctgttgggactgtgctagtgtctcttgctttcagtgatggctgttgggactgtgctagtgtctcttgctttcagtgatggctgttgggactgtgctagtgtctcatgtttgcagtcatggctgttgggactgtgctagtgtctcttatttgcagacatggatgttgggactactagtttatcttgttttcagggatggctgttgggactgtgccagtgtatcatgtttgcagtcatggctgttgggattgtgctagtgtctcttgtttgcagtcatggctgttgggactgtgctagtgtctcatgtttgcaatcgtggctgttgggactgtgccagtgtatcatgtttgcagtcatggctgttgggactgtgctagtgtctcttgcttgcagtgatggcttctgctgcccttattatcttttgctttcttcctcttcacaagtcttttggttttaagttcagacacaaagcaggggtaacaggggccaggagaactgtctactcaagtcttttgggaactcactcaggtgatgtctgttctagaccagatccaccaccttgcctatatcccttcagaaggacttctctgcttgagtaaattggtatctgggttttaccttactctccttgggtggtagattcactctgcacagtggtggacacagttcctcagccctaactctggaaccagagtggtgtttgctgcattaggggagttttgtatttggctgaaagcaggctaatggccttccctttcactgactcagcacagagcagcagacctaaaggtaaggaaggtaagggaaacatgggcagggcttctctggagcctaaagcagtttctctcaggtttattccccagcacagaactcatagctatgacttcctttcctgacccctctccaaagcagagcaaagcagatgcacgttctggccctgtgctctgttacaggctgtagaggagagctggtgtttactgactctccggtcagggagcgaatctaaaaacaaataacctcattgccttattggtggtggtggtggtggtggtggtggtgtttgattcacaccacaagagtctgttctcttcctccaccatatagatttcagtgattaaacttgggtcaccaggctcggtggcaagtgcctttacctgctgagccacttccctggctcaggaagccagcagcttttgagaaatgaatgccatgatgtttggaatggaagtgggcatgacggatatccctttgtgctccagggtgctgccaaggtctgctatccccaacacctcccatttcccctctccctttcacttctactgtgtggatgttgatgacttggctctgtctccttcccaggcctcttgggagccagctgtctgccatccagccctgcttgtggtgacccctggcgcccacagctctgtccacctgcaccatcttcaggttctttgcctatgcagttgtcacatatatgcacactcagcagccctcatgcagcccccggggagctttgcacactcatcccggcctttgactcagcccctcagacatgatatcccctcaggtgtttcagattaggttgggttcccggctgctgggataggcagttcctaaagttaaaatgaatcatacaaaatacactttctacctcagttagatccctcccttgcatcggatgtcccttacacactccagtttggagcaagcaccgttcttattcctctcccagtctgctccaaggggtctgtgcagctgagaaggagtggttatccatcctcattacacacaccctcacacttatgagcttttaggcaatgtagaatcctcttctctacctctgtctcactgctcacctctaaaggaggaggaggaggaggaggaggaagcagagggtgttagacctcccagttctcagtgagcagccattttcccactcaatgctaacggctccccccccccccccccacttagttaaagccagagcctcaggtcagtgaggagcagctcctttctcatttattttctttctttctttttttcttaaagatttatttattatatgtaagtgcactgtaactgtcttcagacactcaagagggcatcagatatcattatggatggttgtgagccaccatgtggttgctgggatttgaattcaggaccttcagaagagcagtcagtgctcttgaccgctgagccatctctccagcccctctcgtttattttctaaatgcattgaacgtggtctggggattcacgtgggacaacatcatcgtgattctctctctgtgtagattcttgtcatgtttgttgcttattgctgaagtcatgcttactttttacatctgtgttgcaggaaaatacaccatagtcatgctacctagaggatgagggtcacaggaaggggcatttaaaaaatcaagttctgagaacagtatcaggcactcacctgagcccaagtggctgtcactgaaaactgttgtcacttaagtcttgagagttcctggtgctcaggaagtcctactttggtggcaggtggtgaatcaggagggaagggggtgtctctttccacacagaagctgggattagcctcagggccctgggcaactaacagaccacaagagaagtttgtgcagtcctaagaggcccataggaccagcaggtggtgcctcagcggcgccccctggtggcagtggtcggaagctttctacaaacccatggacccagatcaggagagggtgcctgtgtggatggcagctgaccacatctgagaaatcctatacctgaagtttctaagaaacagaagtgagactggggaggcaggggtcgcgctaaacctatctgtcagggaaatgaagtaggtacaatcagcagggatttctcggtaggctaattcctttagaaaagtagacatttgcaattgactttttagatgtgttgtggtcactgaagttagaattggttgcctcttagcctgtaagagactgactgaagaccttaactaaaacaaacaggcccttcggggctattaggtcacctggctttattttatttcattattctggctttgctttctcatttttttactattttctttcttttctatgctatgttttagagtgaggtggcctgcagagtaaattacatgatgaccaaaaggggcagggggaagaaactaggtatggattcttctagaacttctttgttactcgagaagggtaaaagtggaaggggagcgcatgttgggacttgaagaagggctaaccatggcggaatttgaatttctgccttttggcttctttatatttctgaaaatggcatcttgcttattttgccctttgataatagacagtacatttctttttacattttcacagtttcctgtttctttactacctggtgcttgtaaaggtgcacccacagatgagttctgtgagtcagatgtgcttggtgtgtcagcctcgctctgcctcccaggccgtcaaaaaaaaccaaggaagaaatcatttgcagttgcgtgcttctctgttgctgtgataaaacacagatcaacaccaacatgtaggaaagggtttgttgggagttagttctaatgctttgtcttaatttggctcccaaaagccacacttccaaatgctgagggtctctgtccccagctggcttcgattagtaataaagaattgcttggtttacagagtgagttccaggacagccacagggaaaccttgtctcgaaaaaccaaaaaaaaaaaaaaaaaaaaaaaaaaccaaaaaacaaaaaaaaaaccaaaaaacaaaaaaccaaaaacaaaaaaaaccccaaaacaaattgctttaacaaccaaccaactgcagggcagggagatggaggcgggacttttagattgtgagggcaaggatgggactgaggggaagaagagaatcacatgactccgagggggggaaaatcatcatccagcaatgtagggagaaagggaaagcagcccggggtgggggggaggcttcccagaaggtaacagggcagcaaagatatagatttagaaggtattaagcaaggaataacggaggggagtgtgtgctagccgcagggagatctagaagtgcccagccattgagctagtcaagggcatatcaaagttagatggcctgttgtatgactttcattcatgaacccagatctcatgggtgggggcagcatgcacaagacccatcaggagccaaagcagctaactaatcaactgctaaataaactgggtttttttagcttatacttccatgtcacagtccatcactgagggggagtcagggcagggactgatgcagagaacacgatggaggaatgctacttactagctgcctcccactggctcactcaattgccccttccttacccagcccaagtccacccgtccaggggtggcaccatccacagtgggctgggcccttcttcatctattagcaattaagaagatgcccccacagagatgcctacaagtcagtccgacggaggcaatccctccattgaggtcccctcttcccaggtgtgtcaggttgacagctgaagctaatgctgagggtttattttggctcacagttggaaggtacacccatcgtgtcacccatcatgtcaggaatgtcacagcagcaggagcctgtggcatatgcagtcaggaggcagaggatgggagtgtctgtgctcagctcgttatgtctttatatggtctaggatcccttcataagggatggtgctacccacagtgggcgaatcttcccatctctcaacgtgatcaagacaatccccaacgagcatgcccagaagttcatctcccagataattctagatctcatcaagttgatagttgaggttaacaatcctagctggtcttttagaaacatttctaaacgattctgcatccctggaagcctttcaaatggtggcttctcgggtctcagagctgagccacatgggagggacacgggttgtggagttctcctcacacactgttgtgtctgctccccacacactgttacttctttgcttccctgttgctttggtcagtcacccagagatcttacctgggtgaagaggactggtgtgcaaagaccataagttcagcctcagccaggtgacgtggtcaccccactgagaggcccaggttagtaccttgctttaggtaatatccagctgctatacaggaaagcctgaaaacaaaagtcagatgcagtttttaggccccagggccattctccagaccagcattccatcccagtgtcccttggcatgttctttgtgtttcccagcatccttcctctgcctgagtcagctattgtccgctgagcatcctcctgcagctgcccaggtctgcttcccctggctggttttccttctctgcatccagttctggctgtcaccctgaatggcttggatgttcacaggagctcaaggtggcattgccatctttgacaccacagccactcactcaaagcccgggccttgaaccctcgacccccagcatccacagttagtgtaatctggactcttgtctctctcaagcttcagattttctcagctggttacctggcatctcctctgggtctcagcatgactgtgtggatttaagcctgccttctaaccctccatccttctttgtttcatccagtaaagagtgtcacccatccagacatctggcaggcacgttagaacctcttctcccattgttttctccatccactcaaccatccctgtttattctcaccaccactccttccaccctcactgtgtttaccctacccttacccagttattgccatcctgaacctaattgttgccccttaacccagttattgccccctaaacccagttgttgccccacccatacccaggtgctgaactgatacatctgccaggttctccttagctcacgcttctctcacattgcagagcaaggtaccaccaccccttccttcctgttatggatgtgtgatttgcccttgttttctgtcacactctcttctccacaattcctcctgctctgactactttggtctctttccgttcctcccacagcctgggaccctgccaggctttacacaaaccggtccagctactggaatgcggatcttggcactcataacctggccaactcccaccatcatctttcaggtctcagttgaaatcacagaaagtcaggccctaactcccagctgagttaggtcaaccctccctcccattactttccttgtagtctgtcagtacatgccagtacatgttagtacatgttagtacatgtcagtacatgttactacatgtcagtacatgttactacatgtcagtacatgttagtacatgttactacatgtcagtacatgtcagtgcctgtgccagaccaggttgggctccctgagagcacaatgattttgttcaggggaacttcctctcatgaagccagtgctttgcacgacccagcagagagacagaattggggatccaagctaggctgatcttgatcaaaggtgatatctggctttcctaagcctcaggttggtctgagccaggcttccttcctcttctccactgcagagagaagtgtgcctctctccttcattccgtctccagctcaggcataattcagatagggttaccaacagaacaaaacctcacacgcc

SEQ ID NO: 923 - DNA, 3317 bp, Mus musculus
atggctgtggcctcacctccgccagagccggaagacctcctgattgtgaagctggaggaggactcgtggggatcagactccagacccgagaaggagagccacagccccgtccctggccccgaggtttcccgccggtgtttcaggcagttccgataccgggatgcagctggaccccatgaggccttcagccagctctgggcgctctgctgtcgttggctgagacctgagcttcgcctcaaagaacagatcctggaactgttggtgctggagcagttcctgtccatcttacccagggaggtgcagacctgggtgcaggcacgacaccccgagagcggagaggaggcggtggccctggtggaggattggcaccgagaggcctgggctgccggacagcagggactggagctatgctctgaagactccaggtccttcgaagcagttcaggagttccagaggttccagctgcagccagtgacccacggctctgagggccagccccgaaaacagtgggtggagaatgcatgtcccgacctttccaagatgccacctgagtccttgaaagagagtgctgtcctcacaccccaagccccaactgttccaaagatggcgagcattggagattgggaggtggcaggcaagtcccaggaaactccgagccccagtagacaagccaagaaggagccctgccaggaccccgcaggaggtgatcgtggggacagtgcgtgcctgggagttccagcttcaaagccaagtgccacctcccagcaagagcaaggaccggagatttggggtctgagccttataaattctgggaatgggagtgctgcagacgatagcctggacagtgcgcaagacaagccagtgcaggcagtggcccaggcagactcaagggcctggggagagccgtgccaatggggtgcggaggacatgaaggtgtcaggtgttcactggggctatgaggaaaccaagactttcctggccatcttaagtgagtctcctttctctgaaaagctccagacctgtcaccagaaccgccaggtataccgggctatcgcagagcgactgagggcacggggcttcttgcggactctggagcagtgtcgctacagggtcaaaaaccttctccggaactaccggaaagccaagaacagccatccgccagggacctgccccttctatgaggagctggaggcccttgtgagggctcggacagccatcagaagaacctcaggtgggccaggagaggcagtggcactccccaggctgggtgacagcgacactgagatggatgaccaagacgaagggagctgggagcccgaggagaccgtggaagactgcagtggttctggcctggccgccgaggagtctcttcaggggcccaggattgcagggggcccagctctgctccagagccgtattgcaggcgtgcactggggcttcgaagagaccaaggtctttctggcaattctcagtgagtcccccttcgccgaaaagcttcgcacctgtcaccaaaacagccagatataccgggccatcgctgaacggctgcgtgcgctgggtttcctgcggacgctggaacaatgccgctaccgattcaagaaccttcttcgaagctacaggaaagccaagagcagctgtccaccaggaacctgcccgttctatgaggagatggactcactgatgagggctcggactgtgatcagagccgtggagatggtaggagaagccacaggcctccctggatctgggcagagcagtactgaggctgatgaccaagaggcctggggtgagatggaagatgaggacgccgttagacttctgactccagactcccagcctgcagatgcaggatttgagttgaagcgtgaggaagaagaccagatttcagagcaggatgttttgggggatttgcctggcgccttatcaagatataccaccaaagccgtttgccagccttgtgactggggggaggaccatgtgaacggaaatgaaggggagtggaggaacacatgggaagagtgctcctctgaggaggacttagaaaaactcattgaccaccaaggcctgtacctcacagagaaaccctacggatgtgacacacgtgccaaaagcttcagtcggaaagtgcatttctttgccccgcagcggacccattcaagtgagaaaccctacaagtgtcttggctctgggaagagttttagtgaccgtgccaacctcagtacccaccagagaatccatattggagagaagccgtacagatgcctggagtgtgggaagagcttcaatgacccctctaacctcatcacccaccagagaacccacacaggggaaaagccctataaatgtgggctgtgttggaaaagctttaaccagagctcaaacctgctgaaacatcagcgggtccacttgggaggacctcccaaccagcgggatgagcccggggagaactttggccaaagtctatcatacagtgctcactggagacgaaattctacacaggagggacctaaagaacctcagaatatcagcatgggtgccgactctcctggagcctgtcaccccaactccggggagaagctgtactcgtgccctgagtgtggaaggtgcttctctaagagctctgccctcacgagtcaccaaaggatccacagtggcgagaagccgtatgagtgtgccgtgtgcgggaagagtttcagcaagagctccagcctggctaaccaccgacggactcacaccggcgagaagccgcacaagtgtgcggactgcgggaagtgcttcagcgagcgttccaagctcatcacccaccagagggtccacacgggagagaagccctacgaatgccccgagtgtggcaagttcttccgagaccgctccaacctcatcacccaccagaggattcacacgggagagaagccgtacgagtgcagagagtgcgggaagtgcttcaaccagagctccagcctcatcattcaccagcggattcacacgggcgagaaaccctacaagtgcacagaatgcggcaaagacttcaacaacagctcccacttcagcgcccaccgcagaacccacgcgggagggaaagcgttgtaggcaacacctcctcctcctcctgacagaagcaataatgtgtatctatgcctctcaagttcctaaaacactctagaaagaaaccttccgatgtttaagcttgctgtaaatctagaggtgccatctttgtaaaatccgggtaatttggaagtgaatttcagtgactaaggtttgaaggtacttccaagtgtaatttggtttgcacacgcccaatacacacatagaatcct

SEQ ID NO: 924 - protein, 1011 aa, Mus musculus
MAVDPPEPEDLLIVKLEEDSWGSDSRPEKESHSPVPGPEVSRRCFRQFRYRDAAGFAFSQLWALCCRWLRPELRLKEQILLVLEQFLSILPREVQTWVQARHPESGEEAVVEDWHREAWAAGQQGLELCSEDSRSFEAVQEFQRFQLQPVTHGSEGQPRKQWVENACPDLSKMPPESLKESAVLTPQAPTVPKMASIGDWEVAGKSQETPSPSRQAKKEPCQDPAGGDRGDSACLGVPASKPSATSQQEQGPEIWGLSLINSGNGSAADDSLDSAQDKPVQAVAQADSRAWGEPCQWGAEDMKVSGVHWGYEETKTFLAILSESPFSEKLQTCHQNRQVYRAIAERLRRFLRTLEQCRYRVKNLLRNYRKAKNSHPPGTCPFYEELEALVRARTAIRRTSGGPGEAVPRLGDSDTEMDDQDEGSWEPEETVEDCSGSGLAAEESLQGPRIAGGPALLQSRIAGVHWGFEETKVFLAILSESPFAEKLRTCHQNSQIYRAIAERLRALGFLRTLEQCRYRFKNLLRSYRKAKSSCPPGTCPFYEEMDSLMRARTVIRAVEMVGEATGLPGSGQSSTEADDQEAWGEMEDEDAVRLLTPDSQPADAGFELKREEEDQISEQDVLGDLPGALSRYTTKAVCQPCDWGEDHVNGNEGEWRNTWEECSSEEDLEKLIDHQGLTEKPYGCDTRAKSFSRKVHFFAPQRTHSSEKPYKCLGSGKSFSDRANLSTHQRIHIGEKPYRCLECGKSFNDPSNLITHQRTHTGEKPYKCGLCWKSFNQSSNLLKHQRVHLGGPPNQRDEPGENFGQSLSYSAHWRRNSTQEGPKEPQNISMGADSPGACHPNSGEKKCPECGRCFSKSSALTSHQRIHSGEKPYECAVCGKSFSKSSSLANHRRTHTGEKPHKCADCGKCFSSKLITHQRVHTGEKPYECPECGKFFRDRSNLITHQRIHTGEKPYECRECGKCFNQSSSLIIHQRIHTGEKPYKCTECGKDFNNSSHFSAHRRTHAGGKAL

SEQ ID NO: 925 - DNA, 42811 bp, Homo sapiens
aagtctgtcctccaggaggacaggagcgcctaggtggggctggggagcactgagtgtatggaaaagggggtggtggagacagggggtccggagcctgtgtgaggagaaaggagccgctgagcttggagggaggggagacaggtggatggagacagaaagagaaagggccctccagaaggtggcccggaccaaagcaaagatgtctgttttcatttcattcaatttattattttgtttatttgcaatgctggtttctcagttctctttctttccagaacagttctctctgggcagccctggccagactgcagcatgagaattgatctgacctcagcctccttctgtaaacttctcacgctagcctcgggtggggatggtgcaaacctagtcctctgggtgtgtgtggggagcgatgggcaagggggctacaggtgggtcttctgggctctaagggctacatttggcctctcaagtttgagggtggatctatttgctgctatgccgacactccatccccacccagcctgaccatgaccctgggttctcattccagctctgccacctgccttctgcttggccctggaaaatccccttcttctgtctgggcctcagttttcccatatgaaaaggaaggcgttggactagatgaactcagagggcttttatggctcaggcagtctgtaagtctcagacctctgaagggtatgactggggaaaggaaagaaacatgaacaggagtcccaaaggatttcccatcaaacactgcattcccctacacccctcacttgggaaattagggtaaagcaaatcaatctcctggctaccattacaaggagaatgaggcagtcccattcaagtatttccttcctttctgcttgactgcaaattccactcttctcactttaaaataagtaaaagccaggccgggcatggtagctcactcctgtaatcccagcactttgggaggctgaggcaggtgaatcatctgaggtcaggagttcgagaccagcctggccaacaaggtgaaaccccgtctctactaaaaatataaaaattagccaggcatggtggtgcaggcctgtaatcccagctactctggaggctgaggcagaaggatggcttaagcccaggagtttgaggctgtagtgagctatgactgcactactgcacttcagcagagcaagaccctgtctcaaaaataaaatagaatagaatagaataaaaggtactcccaaagggaaaggagctacatatgcccatcttcttccataaactcatcaagaatataagtcccacttcctcccagaggagttgtgaaggggtgaagacaaactagagggttatactaacggatgtcccttcacatggaagaaaacatcagaagtgggtaacacgcattctcccctaaccacacagttctagacatgtatcataaactcagtaagtttcatacagactagtgggtatttaccatcactttggctgccctgcatctgacgattccatgagataccccaaaatccttttcacaagttccttttctgctttaatcagttagaatcagtttctgttgcatataacaaaaccctgactgatgtagaaatttgtacaagaaatggttgtggacaagagaccctcaggaaaagagggggaatctgaggattggttatttgggcctgttgggactgagggcagtgaaaatccagcgtcagacagtgggattctgacatattgagcatacactggtgaaagaaccaagttaaaatttctagtcacctggaatgaagtgccccttgaaagcaagcctctaagaggcagagtggccatcgctgtaaggtaatctgagggccacaaagatttcaaggggccatgaggcaggatggttgcttctagttatactgtataggttcatatcataactcctcaactaaagtgtttacctaaaagctagggagcttttataactgtggctgaagaatctcaagttgtttttttttttcacccctgggaggtgattgaattgtgggagaaggcccctcatgaatggtttaccatcatcccctgggtgatgagtgaattctcgctctaagttgactgagatctagttctttacaagtgtgtggtcatagagggaaacaacagacactggggcttacctgagggttggcgggttgagtggggggttggtggtgggaggagggagagaatcaggaaaaataactaatgggtactaggctgaatacctggaggatgaaataatctgtacgtcaaactcccatgacaccagtttgcctatatgacaaacctgcacaactattcctgaacttaaaataaaagttaaaaaaaaaaaaagcatgtggcgtctctcccttctctctcgctcccagtgttgccatgtgacactcttgctttccctttgcctgtgaaaatgtagcttcctgaggcctcaccagaagctgaacagatgctggtgccatgcttcttatacagcccgcagagccatgagccaataaatcctctttataaattacctagtcttcggtattcctttataccaacgcaaataatggcccaatacagggcccttccttccttgctgcagcctggaagagcaggaatggagccttatagtcttctgaagtttgggctttttggaatcttccatttggaacactgcaagatatccaagagagcaacatttcgatgtattattttgcttacaagacttctgctttttagaaaaccctgatttcttcccactttctgttaggagtaaggagagcaagtagtaatgagggatgatgaggagtgaaagcccattctgacatccatgtgtcatttgcagcaatcttatgaagcaggcagtagtatatttattttacagatgaggaaactgaagtttagagaggtgaagtaccgtgcccagaataatgacagagtggttcctagacctgtgatcccaagtcttgtgctcagaaacagtgcttgcttcctttttttttttttttttagatggagtttcactctgttgcccaggctggagtgcagtgacatggtctctgctcactgcagcctctgcctcctgggttcaagcgattctcctgcctcagcctcccgagtagctgggactacaggagcctgtcaccacacctggctaatttttgtatttttagtagtgatggggtttcaccatgttggccaggctggtctcgaactcctgacctcaggtgatctgcccgccttggcctcccaaagtgctgggattacaggcgtgagccaccttgcccagcctgcttgcttccttaaaacagagaagtgagaccgggaccccatctcaccattagtctgcttcttctttttcctgacccttggaacctcagctataagtatctccttgtcccactcttccattcaactccctagcagttctactgttggtcctttgaccgtggcacactgggggccgtgtatcttttcactgttgtgagtattgtgtatgtgtattttggagggggaggatagggtctggaaaagggaaggggatagagtgggattctgattctgcttctctgtggactagacttggtgctgagatggacaggcacttgctgttgcctggtctgctcctgtcccttcctctgaccgcaggctggaccatctccaatagtttagtgactgaaggctcccggctgtctatggtctcccgcttcttcctgatttgcctcttggactccagcctgcctttcctcaccacatgcctctcagtgatcaacttggtgcgggccttggaaactgtgctgcagaacgtggagggtctctgtcaatctggttccacttctgctctgcctcaggatgccttctcccgctttcctgggctcaaggtcctggggctgaatctgcatctcacccagctcctgccaggagctctctgggggttggggcagctgcattatgtctttcatagctcccaccgtgggagcattaatcttcctaccgctgatgcctttggtgacctgagatccctccaggaccttgctttcttgggttcctgcctggatgggagcttgggtgtccggttgcctcccagtctgtgatggctgtcgatcaggtgtaatttccttcagaatgtgggggtgctggctgatatcttcccagatctggtgcatggcccctcctctggggatgcctgggccttggacatgttggacctgtcattcaatagtaggctgaagctggccagtcctggagccttccaggtcctcaagctggggactctgaatctggaccacacaaagatgaaggcagatgcactggtgggacgggggctgcagagattggatgccctgtgacactcactgacatggctgagctgcctgccaggatggttgcccattttgagcttcaggagctgaatttggggattaatcggacaaggcacatagccctggaaggcctggcttcctgtcacagcctgaagagctcgggtcttcggagcaatggcctgattgagttaccacgaggtttcctggctgccatgcccaggcttcagagactgaacctggccaacaaccaactgaggagcgccatgttgtgtatgaatgagacagggtttgtgtcaggattgtgggccctggatctgtccaagaataggctgtgtaccctgtccccagtcatcttctcctgtttgccccacctgcgggagctgctacttcaagggaaccaactggtttgcttgaaagaccaggtattccagggcctacagaggctacagaccttgaacttgggcaataatccactggtaaccctgggtgagggctggctggctcctctgcctacactgaccacccaaaacctggtaggtactcacatggtgctgagcccaacctggggcttccggggcccagaaagtctgcacagcttgagaatacagtttccctttggccctgcgggagtagcattttccctgctcacaagactgactagcttggagctccacgcagtttcaggcatgaagcattggaggttgtctcctaatgtctttccagtcttgcagatcctgactttaaagggctggggactgcagctagagacccagaatatctccaagatcttccctgcccttcatcaactctccctgcttggcagtaggttggagcccctctgttcccaggacacctccagcttcttcctctggcagctcccgaagctcaagtccttgaaggatggggaaacaggcatagccctaggccctactgcatcacgggactgcccagtctacaggagctgaagctgcaggcactgcagtctcaagcatgcccctgcccagtgcggcttgaggagctggtgggtgagttgcccaggcttgatatgctgcagctgtcccaaacagggttggagacactgtctgctgctgcttttgggggcctcggcagtctccaggtcttagtactagacagggagaaagacttcatgctggatgacagcctccaggagcacagtcctcggatgccccagtacatctatattctgacctcatccttggcctgccagtgtgccaatgcctgcgtggggccctggctttagcagtcccccagaacatacatgcacatagtatcacagcagctgtgccattcagaagctgggggccactcaaagaatctctttttcccttttctctggagccactgccccaagactttggggttggagctcttttttgcgcagctctgccctgctgcttctgctggtctccttgcccttcctaaaggaagccaggaattcctggatcctctaactcaaggccttgctcagggtttggttccagagtctgaggagtcagaagggtaaaggcaagaggttcctctatgacgtgtttgtgtcccactgcaggcaagaccagggctggatggtgcaggagctgctgcctgctctagaggactgccctccagctggccgggggctgccactctgcctccatgagtgggattttgagccaggcaaggatgtggctgacaatgcagcagacagcatggtgggcagctgggtcacgctctgtgtgctgagtcaccaggccctgcacaccccctgctgatgcctggagctcctcctggccacctcctttctgctggctgtcccccaccccccaagggctactgctggtcttcctggagcccatcttacgccactagctcccttgctgccacagattggcctggttgctccgctgaagagactattgcatgtggcccaaggaagaggaaagaaagaatgacttctgggcttggttagggagcaggctggagcaccctggggtagggtagaatgggtgcgtgtgtgttggaaggtgggggtaagaaaagcaagccagcttggcagggagatagtgagtatgtgtgggctatgagactgaactcagtttttagtagaaggtggggctactgtgtgtgcaagggagaatcaaatgggaacacaggctttgggaaggctctggaggctgaataagaaaatctgggagatggcaggtggccatgtggtacgtaatgtaatctcaagatctccaaaccctcaataaatgtactaaatccatgaatgcttggcttgattgaattttttttttttgagatgcagttttgctcttgttatccgggctggagtacaatgaggcagaaggtgaaagggttggattcacagaaactgtagtccagaggaaataaggttggaaattcatggagagagagggcaaagagagaagcctttggccagtcctaagctgtggaatggggtccaggtcaagttcaaccagatcttcaaggggccaagggaccccttttgccatctgggttatagagggattggcagctaaggatcaaaaagctgggatgctgcccaggagacagcagactgattgcctgttccctcaataaaaaacatgaaggcctgttcccatctatctccagttaagcctcatagcaacactgggaggagaagcctacccccttgtcactctgtactctgactatgctagactacctgtgggtcccaggacatcatcacaccttttgtctctgggccattgcatatgctgttcttgcactgaaaaataccttttccctggggaactcttaagtattatttaagatgcagttcagccatcactttcttcagaagcctttcctgatctcccagcctagataactgttgcccctgggctcccacaatttcctgcacctccctttctcaaaggactgatcacaggcctgaaagccacagaaatagtggtctccaaagctgagtgcacaagattatcacactatggttgcaaagaaactgttataacttctatttctattttttaaaaatcttaccttattctgaagctagactgcctgcttttttagccacgtgccgttagcatgttatttaacctctctataccatagtttccttttctgtaatatgggatagtgttagactctccctcaaagggttttggatgtattaaatgagttaatacatataaagcactgagagaaggacctaataatgcattgcaaatgttcaaggaaagttagctattacaggcacatcatttataagtaaataaatacacatatgttgggagtgtgtgctcaactcaaaaactcaaaaaggcttcacttatgggagcgctctattgggaaagtttagagatcaggccctggggtcagagaccaggtttgcttcatctctgcatccttagagcctagtgtctgcccaaatcagagagagtcctggtagacaaatgcagacagaacgcttgcaaaccaaatcctgatgggtgctgaaccagagagaacctggaacaggttcaggctctgttgcttatttctacacggcactaaagggcagttggcctcttgaggacttcgttagttttttctcttctgtagaatgccaggctttaattagacaaaggctaagggaaaccatagaataattcgaggctgtattgagggcgaggcgcgccctcttgtgtcctaatgatgtcctctcctctctctgcacactcgcctcccttcttcctcttagggcagatgatgctgaagtggacacgtccttacctgaccctgcaaagctgcctctccagcttcagatcctgacactctctcaaatgtttccggctcccttggcaccccacactgttgcactgtccctccccatctcaaaccctcctacttccacatatggtctcttcctcatgcagtgtaggacctttggagtcacatgcctagggggtgacaaatcgcagccctggttcttattggctctgtgatcttgagtaggtcacttcgtttctctaagtctcattccctctttgtaaagtggagcaaacaataccaatctcatagggctactgtgagacttcaacaccaaggagtatttacgggttgttattatgtttactgagtaaaatcacatgagttattactacaaataagttggaacatgtttcacagagaaggaatttaaactgggtcgttaaagctaagaattctcctattttaacactagccaacatgcattgagctcttaccagatgctaggtattgtcaattttccctaagccgcataaccattggtaataataataatagctaatgattatgtatattattgtattttctattttttaaaatagagacgaggtctcacttcgctgcccagtctggtctcaaactcctggactaaagcgatccttccgtctcagcctcccagagggctgggattacaggcatgagcctccgtgcctggactagctaatgattattaaacactttctgtgtgtcagacatgtgtcacgctctttacataccttctcccatttattcctctcaacaaccgtctcaggaagaggcaagtattatcattcccattttacagctgggaaaatgcaggcataaagaagctaagtaatttgcccaaggtttcacaacgcgggtggtatgacctgcatccttcatttgaaagtaagaactttcagacacaagcagcttgacttcagagacttttacctaaatagtctcatttaaccttcataacaccctgtgatgtaagttctcttacattacttgcattttatagatgaaaattccaaagacaaaatagatggcagtaatttgttcaaggccacacagctgcgaagtagttgagttgggatttggatccatgtctgactacaaagcccccattctcaacaccacattagattgttcatgccccaaagtattcacagtggtacagagcacccgcatttatatgaggattattttgtaataatgattaacattcttccaacacctaggaagtgccaagctctgtactaactgatttacataataatagctaacaatcgctgtgcattattaggagccaggccctgagctaatcgttttaggtgtattatctcattgaaagttcacaaaactctgtgacatggatgccattactaccctcattttatggttgaagagaacgaggttcagaattcttccaaagtcacacagcttagctgtaagctggaaattaaagctacaactgtccagttctctcctgcctatcgggctggtcacctctagtcattctctcttcttatttcttattgtgtctgctttgatctttcagggtctgaggctctcacttcgacccctcagtagaactgggcccccttctgctcgagtgccctcccattgggcggtgctgttatccggaagcctatggaaaaggccaggatcgcaacaggtcccgcccccatgtgtcgcgcccgttccgatttgttccagtgccagggtccgttagaagatgacatatctattggctgaagacgtctgaaaggcagcaaacggagggggccgcccccggcgctcgcgcggttccttctgggaattgtggtctcagacgttccattcccagggtggcgccgctcggactccgcgtcccagcattccccgcacgagcccgggagcacttccgccctgttgtgaagtgggtgtctcggtgggtgagtccgggtggcggggcgggggcagctgagacgcaggctctgggctggagacttaggaggtggtggtgacacagggggctggggaaggtgagaggggagaaagaagcttatatgtgggggtggagggtgagggacggtcaaaggatgtagaggccggagatgggaagggtcatacaggggtcggggatgaggaggcgatagagggccctgggaatgaggagggccttagaagggtctgaaggtgagggggttgagggaggttttggaggtgggagagtcatagaaaggtctggagaccacagaggaaaggatagagggtctggggccctggcaagaagtgaagagggcctgagcttgaagcccgaccttaaaaatagtgtttcaatctctaccttcccatctagaacaagcatatctaatttgttacctccctaatgattgttacctctggaacccagtggatgggactggctattgtgttctgccccaaacctgcacttctttccttatgtcttatggaagtcagtggcacgatcatcccatttacctacctacctacctacttacccactgattcctcttgcattcttccacgtccaaggatcttccgatctttaatttctttaatatcttttcagtcggcctctttcttgtagggttttcgcagaagccttttcagtttcccagcatgaacacacacattgcacctagtgtgatctgtttcacctacaaatctgattatgccttctgcttgaaaactttcattggcacccagcacctgtaaagtccaaacaccttgtccttcataaactccttttgcagcctaatcttcatgcacctcacactccagggctgtcaaggttttcctcgtttcctgggtaggccatttggttttccatcattatatatgctgttctctcagcttagaatattctctccttgcccttcaccttctttgccaagagaacttctttaacttaaaaaaatttcaactcttactttgctcaattcccttaagcaaattaagtcacccccaaccctcagctcccataacttctcctattaccacatttgatcataattatctgtgaagtgtgtgtctcttccattagactgtgaacatctccaggacaggaacagtgtctcaatcacctctgtttccccattgcccagtctagagcagtaaacacttgatgtaaagcagtaaatacttgatgtatgtatgtgtgaatgaagaccatgcagggtaagctttgctataccagccttgaagacttctattgccagtggatttccagggcaggagctttagtcttcctctgcctggcaaggctatctgctggaagctgaagctgattcattgccaatgggagtttaagccaggggtgacaaatacatggaatgtgtgctgccagtgccccttcctgtgtccctggcagtcatggctaattggttggttctcagcacatattcacactgtactcagagccctcagcacactactctaggcagccacttccagttgattgaagtttctgctttaaatgaaacctatttgctctccctggcttaagcccttatgtgtgaggtcaggtcagactgctttaagccatagcttggactgtcagccaaatgggcctgacagcctttaagagttcccagttttttctctttggaggtcacagaccagtcttggcctttcctgtggaactggagagcatcttctcttcccttttcactgagtgggctcctcatgaccacgttcatacttactgccctaggagtcaagatgcccctcagcttccctgtgtttgtaaagacatcttgattttgatggcagtcagcacttatccctcatgacctgggaggctctgtactctttctaggtctttctggatattggaagagagctttgagatcacttagctgaatctaagtggcaaagcgacagcccatgctgaatgaagtccaccatcatgctttatttaatctcatagtgtgtgaaaaaattttgagttggttaccaacatttaaaaatccagagtgctagtttcttttggaaaaatcagcaggcttaggaatattctgggcatatgttcccctggcactctatagttggctgtagtgcccacccagttcatttcagtcattgactcatttacattgctaggtccttatacccatttaaacttgtagccactgactctagtctcccttctcccttgctctaccccatcatactaattggggaacctagggcaactgctgagtaagatcaggctgtaagctgcagcctagctaggcagccacaggggctacataacttgtccaaagtaacacagctgattagtggcaggagtggaactagaaccccagtctgctcactcctgccttactgttctttccattctcccgtactgtcatcttaagagtttggatgactagcacacatagaggaggctataagacatggttaagaaaaatgattggagaaaagggatctcggcttagaccctaactctaccacttgctagttgtgtaaccttaagtgaatcttcataaacactcagtttccctttaggtaattgaggatatagtgcagtcataccttatcagataataatattctaagggtgaaaatcactttagccaaaaatcacagttagtttgaaaatcctttggcaaggagccgtttcagaaactaacacgctgcctttcaataaataaactaaacagcacagctgggctttcttgtttgaacattagatgagaattcgcttgtattagggactgtgcggtatgaaagacactttactcacacttagtggaaagagaggcacgagggaatcaagaccaacctggtgaatagcgaagtcctaggtgccaccaccacatgcttattctcgaacagatagtgaacgcaactggctgcactatttaaatcatgctctttctctctttcttttttttttcttctttttctgagacagagtcgtgctctgttgcccaggctggagtgcagtggcacgatctcagctcactgcaacctccgcctcctgggtttaagcaattctcctgcctcagcctcccgagtagctgggattacaggtacgagccaccacgcttggctattttttttttttttgtatttttagtagagacagggtttcaccatgttggccaggctggtctcgaactcctgaccttgtgatctccctgcctcggcctcccaaagtgctgggattacaggcgtgagccaccgcgcccggccctctttctctctttctgatctttgcagtggaagttacagatcagtgaaatgcagctcaacacctaatgagactccagttgctgcctggaggcttcagtgagattatgaatgtggaacacagcactgtgcctggcaccttgtgggcactcagtaaaggggtactcttagaaattgctggtcctaatgaggctcgatattcctggtcatctcggaactgaggaatgccccggtccattttcccttgttcacttctgtgtgaagtcacccggctgttggccgactctgttggcctccctctccccacaatagcctgctatccatacttcggtctaacttccttagaaagttacggttatggttccttagaaaaaaaaggttatggtgatatgtggtccctggggctttccgatttctatttgaaacaaacctttgggactttcaagtctttccaggagaaaatacctattatctgagactctgagctttgggcctggtgtgactgctaattgcctattttgttgtagtgtcctgtttatgcaggaacgcaaatgtctttgcttgcttattgactgtctgtctcactagactgtaattttattgaaggtagggactgtcagtcccagctactggtagatctgtagcttccaaacagggtatagctggtactctataaatgattgatgaattgctccttgtgtgagagggtgacagaaatgtgtttgaactcatgcatcaataaggttgtggttcaaaaagaaatttcatgaaaggcgaattctttaggttcaaaaagaaatttcatgaaaggcaaaatctttctacatatgtgatctctctgagtgcttatagcagtaatgtaggtagacagaaatagtttagtttaatataaattatggaatatctgtatcccattaggcttttgatacgccaggtttatcattttaatacatggtaataaaactttttaatggccctgctatttatcagatactgggttgagcactgtggatacagaaattagtaacatacaatactgattctagtaatatagtataatgtgggtgtcagatatagtaacaggtaactacaatagtgtaggataatacctatattagaggtatgtaccaattgctttggtgatataggatcagggaggcaattcttggagggcaggacatgaaaagggcatgtcaaggaactcctatcaaaggaggtgacatttgagctggtggttgaaggatgagtaggaagctgccaggtagccatgagttgtgctttaagcctcttcctaagcatatggaggcctttagggcaagactttaatttttattacccttgtcttgtttctcttcagtccagtcagattgcccaaaatgaaaaataccaccatctctccattctcaattcagttgtgtcattcccacttggaagcagctaatgatctcctttgagtgggcattttttatgtcacccagacttgttgggatgacacagagagctcattttttcaaataacccagcatgggtgccatcagagaggctgtaatctcctctgggacacacatagatacgcacatccttctcatacaatgtctcatacagtgtagaaagtggtaagtgtcacagagacatggaaataaaagagaaaggaattccttttggcatgagcgcgaaggtcatttattttttatctagtgtgcacagaaagggattaattgcaatccttgcttaatgacacaccatcatcattagtcaatcattcatgactttattatttattgagtacttcctatatgtgctgagcactgtgctaggtctcttgggaagctaatgatctagtgggtaagaaaattacagtaaagcatgatctgggctatggtagagaaaatgtaagatgctatgggagcttgtggtcgaggactgaatcttgtttcagggtgcagggaaggccttacggaaaaagagcaatttaagctgagaccttgctagctgaaggaagggaggagaccattcccaaaggagaccttcccaaagaggggaaggttcagagggcagcgtggtgtaagatctggaagctgtgcttctggagcaccatgactagtggagcatggtaaagagacgagttggagacttgggtaaggcttgtgctttgtcctgagggaaatggtagatcactggagggtgtttagcagggaggtggtgtagtcaggctttgatctagtttggttgttgtgcaaacaatagagcagaggttggggtgaggtgagtggaggcagggacgtgttaggagactgatcaggtggaagacatgatgattctctgcactgaagtggtagcattggagatggagatgccaagtggacacagcgtggtgatgaattggatttgggggatcttagagaatgatgatgaccaggtttctggtgtggagaacttgatggcagtgccttcactgaagggggagcttcagaaggcagacatgattgcaggagaaaataacaaatccagtttttgactcattgagtttgaggtgcctaagggacagtcaagtagaagtgtcatgaaggggtttggattttggggtctggaggtctggaaacaggtccttgctggagttttaggagtcatgtatagggatgatgaataatgccaaataggtgggatgaccaggggatagcatagagttgttggattttgcaaggagaacatccttagaggaatgccagccaagctttaagattagggaagaaaggccttaggaagggggtgacatttggaacccaacttgagggaaggttggactttggacatgtgtagaagggaggaagtctatactggaccagatcatggaggtgtgggatgccaggctaaggtgttcaggcatgacctagaggattgaatacagtgctgtcttcctccaaagtgtgaggctcaaatgagatattaattgacattttgtgagcactcactgtgtcagacactggtctaagctttttatatatagatccctcatctaatcaacccagcagtcaagtaaggtaggtgctactggctttggtgccagattgtggccttacttcctgcctatgggaaaggggcatctcttagcacctctgcccccatgcaaaggtggcggaagatatgggggaagggggagaatgaagcttctgcatccttttgctcacactctatcctttgtctttctgccttagagccttggggagcagtcccttttctaggagcctcttgaaggactcaccgtagatgcaggaagacattggatgaggtcagcatagctgaagtgaggtgtctgggttagacaatggctatggccctggaattgcaagcccaggcatctccgcagccagagcctgaagaactcctgattgtgaaactggaagaggactcttggggatcagaatccaaactctgggagaaggaccgtggctctgtctctggcccagaggcctcccgccagcgcttcaggcaattccaatacagggatgcagctggaccccacgaggccttcagccagctctgggctctctgctgtcgttggctgaggccggagatccgtctcaaagagcagatcctggagctgctcgtgctggagcagttcctgactatcttgcctagggaggtccagacctgggtgcaggcacgccaccctgagagtggtgaggaggctgtggccttggtggaggattggcaccgagagaccaggactgcaggacagtcggtgagacaaacagtcttctcctgcagaggagtgggtcaggcaaggcagcagggttgtgactacgttaataattgccaaattcacaataaaaataacaatagttattgagaactgacacttattgaccactactgtataccaggaagtgttctaagtgctttacatgtattaacccacttagtcctgtcaacaatttaatgagataggtgctattatcctaattttaccagtgagaaaacagagacagagaaaagataggtaagttgcccagggtctcaacagcttctagatggtagagtcaggatttgaactcaggcattctaactctaaagctggtatgcctaaccactactccaaactgcctcccactaccgtattcacaatatgattaactcgtgttttatacttaacaaaatctttctgcatatgtgatgtctctgagtgcttatagcagtaatgtaggtagacagaaatagtactgttgtccccattttatagattaaactaagagccaaaaagttggccgggagtggtggctcacgcctgtaatcctagcactttgggaggttgaggcaggtggattgcttgagctcaggagttcaagaccagcctgggcaacatggtgaaaccctgtctctacaaaaaatacaaacgaaacaaaacaaaatgccaagtggcccacaaaggtcatcagtgaatagaccagagcctaaagccaaatccttaggttccaaggtcattgttctttctactgcatgtcagatgcctcctctgcaaaccatgggaattaaaatacctttgagccatgaggctcaaatgagatattagttgacattttgtgagcactcactgtgtgtcagatactggtctaagcttatatatatagccctcatctaatcaacccagcaatccaataaggtaggtgctattatcattgccatttgccaaatgggtaaacagagatggagaggtaagtaacttatctaactttatataactacgtgatagagctgaggtaagggaaatgaaagtatggatttaacattcgcagtttcaacaatttgcaagtgaccgctgaaagcccatgatataatgcataattttgctatgacacacattttgaatcctgcttcaaagctggtatatgtagaacagatcctttagctggatccagaaccttcctctaaacatgactttttctctacttgttatagttagtaattcttgtgatattttacttacccacattttgctgggggaaattacaggtttgggaacatatcccttgcaaatggcaggggttttctgtacatttaaactgtaaagttctatacagtgtgaggttgggggagcaaaggttttagaccggtgactttgctctttggattcctttacaaactgattgaagatacagggagactaatatataaagttacagaactaagtatgagagagtgtgccttattttaatgtacctccccacccccctatattatttcttttaaagaaaccagctgtttgtcttaagtggcagtgaagaaacaaatggaagttttagggcttcagagttgggacataaagaacttgagacccagagatgaaaacggatttaaatcaaggtctttatgattcttcatctgtaaaatgagagggttggattagaccaaaggttctcaaattatgcccctgtgagctgaccaaaagttgaactgcttctaaaattgagaaaaaaataaggtaatggaatcttgtctattatgtatttttgtttttactgtgactttttttatttttaaactttcctacctgctcctgagtggtcacaaatttcaaaacaaatggacaagtagcagaggagcttgtttttttcaggtgcaaatgtagcttgtgatcttacattgcaagatatataacttagttgcattctctgcaagtaaaatttttcaagtcttaataatgggatgaaatatagttataatattcctcaaagtgaacctgaaaaaggttggtgcctacaggactaaatggcccctaaggtaatttcctaaaagggatctttcagctctgctattttgtgattgttacttgtttcttctgtcatcaccatcttgttgaatccccctctctgtcagatgccccctctccatcaggtgcacagggatttttaaaaaacaggctttattttttagagcaattttaggctcaaactcacagcaaaattgagcagaaggtacagagagttcccatccctccccgacaagcctccctaactatcaacatccctgcaccagagcaatatgtttattaccattgatgaacctacagtgatacatcattatcatcactcaaagtagcagtttatgttagggctcttaatgttattcattctgtaatgtatgacattaagagccctattataaactgtatctaccatcatagtgacatagtaacatgtatctaccattgtagtgacatacagagtagcttcactgctgtaaaaaccctctgtgttctacctgtttattcttcctttcccccaacccctggcaacaccgatctttatactgtctccatagttttgccttttaaaaaatgttacatagttggaatcatacagtatatagccctttcagattggcttcttttacttagtagtatacatttaagttccctccacgtcttttcatggcttgttagctcatttctctttaatgcttaacaatattccgttgtgtggatgtaccacagtttatttatctactcacctactgaaggacatcttggttccatcaaagttttggcagttatgtatgaagctgctgtaaatattcatatgcaggtttttgtgtggacctagttttcagttcatttgggtaaataccaagggacatgattgctggatcatatggtaagagtatgtttacctttgtaagaaattgccaaactgtcatccaaagtggctgtaccattttgcatttttactagcaatgaatgggagttcttgttgccccacatccttgccagcatttggtgttttggattttggccattctaataggtagatagtggtattttattgttgttcgaatttgcaattcaccaataacctaccatgttatacatgttttcatatgtttacttgccatctgtatattttctttggtgtggtgactgttaaagtcttgcccatttttaaattgggttgtttgtcttcttactcttgagttttaagagttctttgtatgttcggggtaacggtcctttatcagatatgtgttttgcaaatatattctcccagtctgtggcttgtcttctcattctcttgacagtatctttcatagagcagaattttttaattttaacgaagtccagcttatcaattatttctttcatggattatgcctttgattttgtatctgaaaagtcattgctatacctgacattatctcagttttctcctatattttaggaattttatagtttttcattttaacgttaaggtctgtgatccattttgagttgatttttgtgaaggataggatagaagctttttttttttttatgtggatgtccagttttagtatcatttgttgaaaatatatttgcttcactgtattacctttgctcgtttatcaaagttcagtcgactatctttatgtgggactatttctggggtctctattctgttccattgatcgctttattcttttgccaataccacactgtcttgattactatagtttatagtaaatcttgaagtcaggtgtgtcatttctttgatttttttccttctccttcaatattgagttggttattccaggtctttgcttcttcatataaactgcacatggccaggtgcagtggctcacacctgtaatcgcagcactttgagaggacgaaatgggtggattgcttgagcccaggagtttgagaacagcctaggtaacatgatgaaaccccattgctattgaaaaaaaaaaaaaagaaaaacaaacgaacaaaaaaagactttacagtcagtttgttgatatccacaagataaatttctgtgattttgattgggtgttgaatctgtagatcaaattgggaaaagctgacatcttgactacagtgagcctttctatctgtgaacatggaatattgttccatttatttagttcttctttgatgcctttctttggtagttttccccatgtaaatcttctacatattttcttagatttatgcctaaatatttcatttttttggatgagaatgtaaatgttattatgcctttaatttcaaattctacttgttcattgttggtatataggaaggcaattgacttttgcatatttgcatatttgtaccctgcagccttgctataactgcttattagttcccagaagttttttttgttgattcttttagattttctccatagacaatcatgtcatttgtgaacaaagagtctttttctttcttcccaatctacgtaccttttgtttcctttcttatcttgtattagtctggacttccagtatgaaagaatagtgagagagaacatccttgcctttttcctgatcttagtgcaaaagcactgtgtttcttaccattaagtaggatgttagctgtaggttttttgtagatgtcctttatcaagttgaggaagttcccctctattcctagtttgccaagtttttatcatgtgtgttggattttgtcaaatgctttttctgcatctgttgatataatatatgatcatgtgatttttctttttttgcccgttgatgtgatgggttacgttaattgattttcaaatgttggaccaggcttgcatacctgggataaataccacttggttgtggtgtgtaatttcttttttatacattgttggatttgatttgctaatattttattgaggattttgcatctttttttttttttttttagctggagtcttgttggttctgtcgcccaggctggagtgcagtggcatgatctcagctcactgcaacctctgcctcctgggttcaagtgagtctcctgcctcagcctcccgagtagctgggactacaggcatctgcaaccacacccagctgatttttgtatttttagtggagatggggtttcaccatattggccaggctggtctcaaactcctgacttggtgatctgcctgccttggcctctcaaagtgctggtattacaggtctgagccaccacacccagctgatttttgcatctttgttcatgaggaatattggtttgtagctttcttgtcttgtaagtaatttctttggttttggtattagggtaaatgctggctttatagactaaataaggaaatattccctccgcttctatcttctggaagagatagtagagaattgttataatttcttccttaaatgtttggtagaattcaccagtggacccatctgagcttggtgctttgtgttttgaaggttattaattattcagtcaatttccttaatagatattggcctattcagattgtttatttttgtgtgagttttggcagatggggtgggtaaaggaattggtctttttcatctaggttatcaagtgtgtggccatagatattcctttattaacctttatgtagttcataatattcctttattatactttcagtgtctatgggatctgtagtgatgtctctgttttcatttctgatattaataatttgtcttctgtcttcttttcttttttatttttgagacgggttctttctctgttactcaggctggagtgcagtggtgggaccttggctcactgcaccctctgcctcctggacttaagcaaccctcctgcctcagccccccaagtagctgggactacaggaccacaccaccatgcccagctaacttttgtatatttttttttttgttgagatgggatttcaccacgtttcccaagctggtcttgaactcctggcttcaaatgatccaccgccttggccttccagagtgctggggttacatgtgtgagccatcgtgcctggactgtcttttttcttagtctgactagaggcttattgatgttattaatcttttcaaagaactagcttttggttttgttgattttctctattgatttcccattttaaatttcatttatttctgctctaatttttacttcttttcttctgcttactttggatttaatttgctcttcttttttctaggtcttatattggtgtacctgtgtccctggactctgacctttgccagtgcttctcaattttttcccatcttaggtgggacaggatgcctaaagggggctgcactgggtatttcttatcttgcatgtggaagagcagagggagctggaattgcatatttctcttccgacagttaggttaggctttggtaaaatagtttctgctgaggacaggacttattaagaagagcagagtgccctggcatatttcaaaatggttcttttttcctgccatctgccataagcatgaagagatttttctctgatattcactgtgagggtctggttgagctcctggagataaaacttacaaaaatgtgcccctgctcagtgattaagtgccctggagtttttacctctcagagttgtccacactgaccttccagcagttcatcaattacagtttaggtttttctcccctggaactggttcccacagaggcttctgctccactaagttgtgattctctgattctacctgtttgtctctccaattttggggagaatggtttgccctgtgacctcacttctctgacagatctaaggagagttgttgatttttcagtttgttcagctttttacttgttactgtagagtctagaggggcaacttgtagactacagacttcttggaaactagaagtctgacctactaattttttgtctcctggttgtcacttgaatctacttctttctgtgtccaaaattaccatccatggaatcagaatctttgcttagggatggtaatagttggaggcactggggttgagagtaaagattgttgttgaatttagtcacacagttcctctgtaggttataatgataacaaagtgaatttttttttaacatgaccatataagaagattgataagcagatgctttctccctgtgaagtcacacaggacactggtggatcttcttatttggaatggcccttgatgctcatggcccattcctatatgtcttctcaatggtaaaaatccttctctgtgagtggatctgaattttcaggccagccaaaaaagttttggagctaagtttggcaaactcagtaatttaatgaagatagttgttattattttggttcaaaaaaataagactcagagcagtatatctagtcataagtttttgtataaaaaagagggaagctaagaatacacatttacatttgcttgtatgtagaaagaaactctaaaagaatgcagaagagcatagttacctgtgatgaggagaggggaaaagaacggggtcgatgggatgaagatggatggaggtggggcattttcactgaatatacccatgtatgtattttctgtttttaaaccatgtgagtctattatctattgaaaaaaattgaaatatgtttttaaaagttaggtgtttctataaagtattgagattgttatattttggaggttttatagcctgggtaacaccttgacctctctacctgtgaacttggaaccagctgagaaatagagataagaaattagctgtgtgattgatgaagttgattgggtaatgttattttagttgattactcccttttattttaaatatctatatctctgagtaccttttttttttttgcctgaaatccaacattgaaatgaaaattgccacttcctttttccttttgagttagagtgccttgtcttttgcatgtccttctattgtaagattaacaacacgtacttttatctcattttaaaattccatctaatttctttttttgagacaagttctcactccattgtccaggctggagtgcagtggcatgatcataggtcactggtacttcaaacttctgggctcaagtgatccttctgcctcagcctcttgagtagctgggggtacaggcatgtgccaccatgcctggttaattttatttatttatttatttattatagaggtgagggtctgctatgttgcccaggctggtcttgaacccttggcatcaagtgattcccttgcctcagcctcccaaaatgctagaattacaggcatgagccactgcacccagcctccatctgtaattctttgtcctttttaaaaattttattttaaaaatatctttctctttcagcagagatatttagagcaattgcatttggggttataattttatatttttttcctgtttttatgcctccctttgccttttaatatacaacttgataacttttatctttttttgatcatttaaaaagtaagcaacctatttttgatgcttatgggttattttttaatgttacacaaattttacataatttatctctttatgaatcaaaaatgttttgaacagtgggactctcattgaaacacttggatcgccaccctgtgttcaacagatggtactcatttggtggtataaatgctggtctacctaccaaactcactctgatggctttctcatcctatttcaagccattttggatcttaaaagagcctgttagcctctggactgcagttgtactcaaaataccaaagtgggtcttactgaattgttgattgggaattttgactatttgtgtgtagggactggaattgcatacagaagagaccaggcccttaaagacaggggaagaagctcagagcttccagctgcagccagtggatccctggcctgagggacagtcccagaagaagggggtgaagaatacatgccctgaccttcccaatcacctaaatgccgaggtggcaccacagcctttgaaagagagtggtgagtacatctgagaacattagggaatgaggccttctgcaggggagagggatgggaggtgaggaagggtgcatggggaagaaggatgtgcagaattcaaggcaagggataggctgcagtgtggtgggcacacttactgagaagtaagcaagcctcgtaaagaggctgtgcctatcgatgatgtcatcatgccctgctgtagctggagtcctgcagcagtgcaggctgggacaggggtgggtggtgatcacaggaggtcagggctggcatctcccacatggcacaccactcacagcagcttaggagctacacactctagaagggaagtaaaggggaagtctgcactggccatagggatagccctagcttgatccaagtgttacttttggaaagccaatctcaaagggaggtgattttttgggaaccagagcttgggtttcagtgactttttcttttcctcagctgtcctcactccccgagtccctactctcccaaagatggggagcgttggagattgggaggtgacagctgagtcccaggtaagctgttactcgttcttcctttcctgtcattgctgctcctgtgctcttgcccccacagtgttcctcctctctctccatgacctctgctcagcaaaagggcatgaggcccagggtgttagcctttgcccttcacccccagcctgctgggccccaaacatccccaaacacatgtatgtaccaaatggccatcctgctccttatgatgccagcttcacacatggtatccctctgttcccatcatctttcctgggagcctgctagggttcctaggctgttgtcaaaggtcagtgatgtttggggtccttgtcttgtgcatctcgcaggaagccctgggccctggcaaacatgctgagaaggagctctgtaaagaccccccaggagacgactgtgggaacagcgtgtgcctgggtaaggagacgtaccctctgaaggtgatgttgtcatgcttctgatacacccagttcccaaagagggttttgccgctcctttaagaatcatggctctgcagtctctggaatttcagaaataggaagaagacttgccctttgtagccagcactctcatggcagggatggagtctgcctggagacggggtggcaggatggcttccaagagcctgccctctctgggcacattaccttccttacctcagtccattcaccacagtccaggggccaggcctggactgccatctcagaaatctgattttttttagcactgtaaataggatctctctctcaggcagacttaagtgaactaaacccatgagaccaatgaattaaacccaataggaataaatatcacagagcccaaaatacctgaagcccatataagcagcacagactcctttctatgtgggcactcctatgtggcaagccaaataatagggagccgtttccctgtggagcccgggatcactgtgtggggagttagacatgtgaatagctgaaatagaaaagactctgataggcctgactcatggtaagtttagataccagaagctcgctggctacttgcttgacagtggaacccctttttacacatgatatctgggggaaatagtgttcaaaggaacagattttgggaaacgctgaattaaattatccttatacctctttaaacccttttcatctagttttcttcaaatatttatttcaattaaaggcttcctattttgttagggccgggagctgttgggatagcagtccattaaacatagctaacttttaaaaataaggaaatttattttctcacattattagaagtccagaggaggacatgctccagccacagtacagactagctgagcaatgtcttaatgggtctgtgttctttatttctgtctgccatcctcagtgttagcttcatattaaagctgttttgtttcatggtcaaaagatagatgccaatggtggcaatggatgcctagcaggacagagactcactacacacacaaacacacacacacacacacacacacacacacacccttttcctccagccatggagttcagtctaattgggccaatttaggccatgtgcccatctgtggaccaatgagttactcttatatgatgtttcatgtttcataacaacaacaacaacaaacaaatgaacaaagtaaacaggtcacttaacatttctcatatattggtcgtgttacctcttctctctccctattcctgtaaacattttatgggatcaacttgggaatttctcgttagcctcttgcaaggaaaagatagaagtttcagggagattttggacaaacatgccgctcaacagaccatttctactctgtcatttctcttccttttgtaggagttccagtttcaaaaccaagtaatacctccgagaaagagcaaggaccagagttttggggtctaagtcttataaattctgggaaaaggagcactgcagattacagcctggataatgagccagctcaggcattgacctggagggattcaagagcctgggaggaacaataccagtgggatgtggaggacatgaaggtgtcaggtgttcactggggctatgaggagaccaagactttcctggcaattttgagtgaatctcctttctctgaaaagctccggacttgtcaccagaaccgccaggtatatcgggccattgcagagcagctaagggcaaggggcttcctgcggacactggagcaatgtcgctatagggtcaaaaacctcctacggaattaccggaaagccaagagcagccacccaccaggtacctgccccttctatgaggagctggaggccctggtcagggctcggacagccatcagagccacagatggcccaggagaggcagtggcacttcccaggctcggggatagtgacgcagagatggatgagcaggaggaagggggctgggatcctgaagaaatggcagaagactgtaacggtgctggcctggtcaatgttgagtctacccaggggcccaggattgcaggggccccagctctgttccagagtcgtattggtaagaacatgggggtttagtcagattcagatttccaaccctcctaccagctagactgctattccctgaggtcagggcacaggctgcaagtctggattgaagccactagagtgaagagctacattccttaggtcatcctcaaactccaactttcttttcccatgaccaagtctctttgcaaaagtcttcttagttatagaagcaaacatttttaaagccttaaggggcctcaaagagtgaatccagtatttccaaaagtgtgtcactggtagtatgggatgatcatcgacgttacatgaatgaactttaaattcttgtatttatatatttctcttaatttgtatgagtgcatcaacctgtgatttcacagataacaaagttaggtaaagagtgatggcgagtgaaatattgaacagataatggcagaaatcccgacagtgtagacttgaataatcaatgtctgggaaacacccaatcattgtaaaggtgcaaacatggaagtccatgagatgaggcgtcttatagacgcacaggtaggagcagagcccggatcagagcctgtggctcctgcctgccggtttcacatggttttccctccaccatgttgccttcctgggctacatcactttcctgcagaggagctgagactagaccacctccttttcattcccctgcaaaggaggaaagtgtgtcctcatttggcctttcttgcaggactatttgaaactcatttatgcctctaatctttaggaattctcagctttcatgttttgttaaaaggagaatttatggccaggtgcggtggctcacgcctgtaatcccaacactttgggaggctgaggtgggcagatcacgaggtcaggagatcaagactatcctggccaacatggtgaaaccctgtctctactaaaaaaaatacaaaaattagctgggtgtggtggcacgcacctgtaatcccagctactcaggaggctgaggcaggagaattgcttgaacccaggaggcagagattgcagtgagccaggattgcatcactgcactccagcctggcggcaaagcgagactccgtctcaaaaaaaaaaaaaaaaaaaaaagagaatttataaaataaatagagtacaggtattgagtgaatatggggaaaatcacatgcatcccaattacaggcctttccctgaactaatcagctaaagccaggcacatgggatcacctgatataattgatataacatggctacttaagtcctcaccttcagccaagacttgaagtgttaatagaatctcttagaagagggtgagggtgggaagctctggctggctgtcctagcatgcccctgagaagcaaagggatattctccaggtacctggatagtttctgacatgcctatgttctaggtattttgaagggcaggtgactttattctctgatgacctaggcacatctcattaagtctcacagttctcaactcttcactcctgacagcaggtgtgcactggggctatgaggagaccaaggccttcctggcaattctcagtgagtccccattctcggaaaagcttcgtacctgtcaccagaacagccaggtgtaccgggccattgcagagcggctgtgtgctctgggcttcctgcggacactggagcagtgtcgctacagattcaaaaacctccttcgaagctaccggaaagccaagagcagccacccaccagggacatgccctttctatgaggaactggactcgctgatgagggctcgggctgcagtcagggccatggggactgtccgagaggctgcaggtctccctaggtgtgggcagagtagtgctgagactgatgcccaggaggcctggggtgaagtggccaatgaagatgctgtcaaaccttcaaccttgtgtcctaaagccccagacatgggtaagcctggagtaattggatgttctcaaaatctgtgggcatgtggagagaatgaggaagccaggctcattatcttttgtctcttaactaaaagagagaatgggattgaatgggaaaaagtatttctgctttgctcagattatccagtctctagctttgtgtgatcccccgaatcagtcagtcagtcagtcattctatcttttactaggtatatctgggcggttagagactttattcaatccagtatgacacaggatatatggaatgtactagaagaaggaggtgttcatgattgagtactaagatagaggagtttgatggggaaacaggttggctgtggctgctgggctgagccccatggctcacttggtggggtcaccatgtcccagagtccattcctcagctttgcaggtcacaaacacttgtgtgtaccaaaacttgatcaatttcttgttagtcacatttataagatgtgcgatagaagatataagaatcaaattcatgttagccaaattcacagatgtacaatacagacacacacaaacacacacacacgcgcgctaatgagtgaagaaaaactgcatttctgtccattttttcaggttttgaaatgaggcatgaggatgaagaccagatttcagagcaggacatttttgagggtttgcctggagccttatcaaaatgtcctacagaagctgtttgccaacctcttgactggggagaagacagtgaaaatgaaaatgaagatgaagggcagtggggaaatccctcacaggaacagtggcaagaaagttcttctgaagaggacttagaaaaacttattgaccatcaaggcctgtaccttgcggagaaaccctacaagtgtgacacatgcatgaagagcttcagtcggagctcccacttcattgcccatcagcgaatccacacaggtgagaagccctacaaatgccttgaatgtggaaaaaactttagtgaccgctctaacctcaatacccatcagagaatccacactggagagaagccctataaatgccttgaatgtgggaaaagctttagtgaccattctaatctcatcactcaccagagaattcacacgggggaaaagccctataaatgtggagaatgttggaaaagcttcaaccagagctcaaaccttctgaaacatcagagaatccacttgggaggaaatcctgaccagtgtagtgagcctgggggaaactttgcccaaagcccatcttttagtgctcactggaggaattctacagaagagacagctcctgaacaacctcaaagtatcagtaaggacttgaattctcctggaccacacagcacaaactcaggggagaaactttatgagtgttctgaatgtggaagaagcttctctaagagctctgccctcattagtcaccaaagaatccatacgggagagaaaccatatgaatgtgccgaatgtgggaaaagcttcagtaagagctccaccctggccaaccaccagcgcacccacactggagagaagccgtataaatgtgtggactgtgggaagtgcttcagtgagcgctccaagctcatcacacaccagagagtgcacacaggagagaagccctacaaatgccttgagtgtggaaaattcttccgtgaccgttctaacctcattactcaccagaggattcatacgggagagaagccgtataagtgcagagagtgtgggaaatgctttaaccagagctccagtcttattattcaccagagaatccacacaggggagaaaccctacaagtgcacagagtgtggcaaagacttcaacaacagttcccacttcagtgctcaccggagaacccatgcaggagggaaggcgtcgtaggggacagtttcctcaacaacaaaggaggactcaatgtatatatcttatatcataagatgtatgctagagagaaactttccaatttttaagcttggtgtgtacccagggaagttatcttggtataaaccaggtaatttggaagtgaattacaaatactaaggatccagatttgaaggcacttttaagtgtaatttgtttttcttctgtaaagacccacacagaatcctgactgtccttgtatttgctatcatgtaagagctgtgtcagtatttgagccaaactggcaacttacgagattagagttaaatcagtggtcctgagcagtgattccaaactctcactgtgccttcacaccatccatgtgtaatccaccccatcagcagtggttctcctactttctcagtgggggcatatcctcaagggagaatgttgtgactctggtgagagaggagttggcctagagcaggccactgtgagctcagcacagagtaggaagaacagtgacatcattacaaaatcatcaatagcagcaatagctggtgtttattgagctgttgctctttggcaagctctgtgctaagaactttgtatacatcatctcatttaatcttcacaacggccccaggagataagtactaactttcttcccatttcctagaggcttgggaaattaagtaactcgcactggtcacacatctgtaagtgggagaggcaggattcaacagatctgtctgtcttgagtctatcgtgctcttattgctatactgaattcccattcatgttaggtaacttaggggccagaatctccatgcactttgtagaccacatttcctgttatgaaatttccacattttgaattttttaaacaaatatggaaactgagaatccctaaggattaaaggacttgggatatccagaattggtgaagtgatttgagcaaggatgagctattatcaaaatacttgatgtgagtttccatcttcgcaataatatgggtgagagatataggtgggttgagattgggaaaaatatgcggcctaagtaatttttcttccaataagatactgctttggctaaggaaatgggatgtaagagttctctttttctcaggggacagtcctacttcttgccatgcttggctgatcataggttaaccctaacagaagcctggggtccctacatttttgtctgtctggcttttccttttggcaagcagaagctttgttcttggtccccatgccaagactgaggtgggaggtgctggtgtatatggtcatctactgagagggccttgaccactgttctgtgtaccaggttcttggcacaattttaccctgagccatcctgtcccaggcctgcccagggctttctgtatgttgacccttaagactcacctcccacatggacaggctaagttagaaaggttcacataggatggttttaacatttgcagcactttggcctccagagtttctccttagaagggtttaaaactgttgaccaaggacttcggtttccataggactttaaaggaaaatccccctcctgccatcctcttatgacactaggatgtattcataacctgcttggttcatgggctggggaagtacctatcagatagtggatgtgaagcagccttgaagaatggaacttttattaacatgcgaggaagccagtggagagatttgctactcccacagagtgatatcccttcttaaccccttcccctgcttcagaacctcctttcccaagaaccagccccactaggatcaccgtcaactccctcccagtttaccttttctggcccacgttatctctgcggggcaggggtcatgggatgaaccctggatagaagtcagcagatgtcagtaactgcagtaatacagtgatattgtctagtaatgtgagctgagaggaaggatcctgaggtgagggagagggagggaattccagggaaaggcactgttgtgtggaatagcatggattcagggtggggttgtatgatgggaggttgggaacagggagctgatattagaggagtgctggagcaaggtcactgaggacctcacatgtgaatggagtgtcaacaccaggcccggggcaatgttcagatgtgcatggttgaaatctgacagctgaatggaacttggacatgctgcaattaggatggccttttgggacactgttgtggtatttcagctaaaggctagggtctgaactagagcagtggtgacactgaggaggagggaatgaatgggaaaggtctcagaggcagaggggaggacatcagaggaaagctagaatgcctttggtgactgggtagagcatgtcctcattcagaattgggagcacaaggaggagaggctgatagagcaggagggcagaagatgagaagtttagtttggtatgtctagaacttgaggtgcttaagggaaatcatggtgatgctatgcatttggatgtcggctagcagctaggggagaggctaggactagagatctgtgtatgcgaagtagttaaactaatgagaaaggaagaatttcagtttcaaatattgggcctaggacagagctacttgatagtgctgaatggagaggaagatggccctcaaaggagatctagaccattccccactcccacccactaccatcatgttctggaccctgtcttctttgttactgacccctgaattcttcatgtagccctgagttttctggagccctcactgtggaagtcaagctgagctctgtgtggatgtgaggtggtagtcctctctccacttggtcaccctttcccctgggtttggtagtgtgttagtgtctcatatctttagtgaacagttttgatgtttattatctgccattcttgtctcatgaatcttaatagaggttcagtcatgaaagcaaggccagtgtgggccaggtgagaaaatggcccaggtggtcccttcctccttgtctacctgacttcctttggaagaagcactctttcagggggcttcagtgttccaggcttgctgtctacccaagagcttgctgggcacccaggcgccctccagtaggtctgtgctgctcagataaactgacatctggttttacacaccctgagctttgctagcgtgattctgctcttgggaagtagattcactctgcagaatgggtggacagtttctcagccttcctggccacaggtcagaccctggttatggaaaaccaaaccagcaaatgctgccctgggagggtgttacatcatgtgagctgctaaaggcaggatcgtctccccagatggctgcctccccttgatttcttcaccctccacctcaagaagggcattggctcctctgaagggacaaaaaggtacctaaaggaccttaggcctcccattcctcagacccccagaggcagcagacccaaaggtaggggcagggaaaggaggggccaagactttttcagatactcggttttttctaaggccttgacctcagcagctgaactcatggtcatggctgccttggccttattgtccactgtagcctcctcccagaagccgagtaaagcagctagggtccctccatgctaaataatgtagtcaggcgctctgggtagtccgtcctgcctcatcttgttctggggcccccagtggggatagctctctgctttcgggctgcagaaaagaattgagtcactttctgtaggggagtaacaccctttggggacaggggtgcagttttgaagtaatgaaggcagtgatgtctggagtgggtgtgggtgttgcaggtgaacttgcctcacccaggctgttctgggtctttgtactccagagttctgtcctaggcttgcttcttcattcactctgtttccctttctcttctttttttcttttcctttctttctctcttttcttctgtgtagatgctaatgacttccagatctgtgtcctgctgtggcctctcctcttaggatcccagctgcctgccaaccagctgtgcttgggtgactcctgggcatctcaaagccccggtgtctaccatcacccatcatggggctcttggcctgcccattcagcacgtgcattgatgtacacactcagtgactcccatccaagcctcccctgcacgtgcctggagagacctgcccattggactcatcttggactcagttctgccaatactttctcccttctaagagcatttccagttgggctggagttacccagctgcctgagaggtctctttctgaatgaagtcaatatctaaagtcaaaattaatcattcaaaatattcccttaccccatttttttttggggggagatgggggtcttgtgttgcccaggctggtcttgaactcctggcctcaagcgatcctcccacctcagcctcccaaagctccccttaacctcagttttgatcccatcctccatttgggcattgctcagctcccccacctgttaatagcaaacaccaatctcaagcccctgccccaatctgctacaaggggttagtgttccatgcagtgggagtgcagggaaggctttacaggagaggagggagttgaaatgggcctggaggcctgggatggtagacactggatccttttcccccacagctcctggctgtttcttcacactcccagcatcactattactgctagcatgtctttagcatcattttgccctccctctgactttcagcaagcctgcacttacctccaaataaatgcatgttttcggggggcaaaggcaggttccttccttaccttattgttgcttcccccaccccatgctgcagctgagtgggtgacctttctcctcacctccgtgtgccgcatctctcacctagtctctgttaggaaccctacaggagcctgcaccccagtaaccccattttatgctgcttggaggaagagacagagagtttgagaggtcttttcagtgtgtgtttggttcccccacttctcaaagctgagagcttctttgttttaagagccacttggttaagtcaagagcattagaagagtaaaaagaagaatccaattagataattttacctaaacatgctatagtcgactagggagtcacatagacattgattttctaatgagggcgctgttggtgattctctctgtgtgtaaagatgcttctgatcatgcctgctattacatgatacttatttctaaagtcactttttttttttttttacattttcattgtagaaaaatatcccataaaaattgtgccccctagagggcgagggccacgggaagggggatcaggaaaacaagaatcagtctctaagctggtcctggagcagcatgacagatgtatctgagcccaagcaggagaggagccacaggcccaggctggcagagttgtgactactagaatctcgagtcactggggctcagggagccctaacttggtggcaggtgacaaatgtggcacaaaggagaaaggagtcttctccttccacatagaacacacttggcttcagtgctttggggggattcgtggaccacagagaagcttccgcatatttataggcactggggaccagcaggaagtggtggtgagacactttgaaaccctccactgcagacttcacccagggggcaaggcaggagagaatccctctgtggacagcacttgagaggaaagggcttgttcatgaccacgtatgaggtcgccaacccaaccctgttcctgaagtttcccagaaatagatggagaggtaaggccagctaggctggagcgccagcatcagtagtaggggcaggagctcacgctaaacccggttggtgtgtcctggagaagcacaggtgtcatctccagggacctttctcgaccaactaatttatggaaatgagacatttgtaattgattttaattccctcttagggactgtgaaattaaaatggattaaattttgtccatcaggagcctcagggatttaatgtccaattctaaaacctgaacaggcccttttgttttgcaatttgtggaccaatccctggcttcattttatttggctttgctttcacttccccattttctgttattttttttttttttttgtgctgttatgtacatctcttaaagctggtcaaatcatattttgggatggaatggcctgataagttaataaattatattaaactgccaaaaaaggaatgtgttttcgattcttctggcttcttcctggttacaccaaaagcatgggggagaaaaggaagggaagtcatcgagacacaggttgtcagggagattggggccaaggtctcaagccccttgtgctgggcaggtgtcttcttttcattgttccctgtggtccttcagacatgggtggctcttcaggcatgtccacaaccccaggagccatggcctcagtggccggcgcaactggccggagccacagtggctccgggtttcggggctgtccttttgtccctttgatcttacgcagggtgagggagccaatcacgagaggctcacccctgacgtcacccagtccccagggccagtgagggccctgcgttccatggggccccctggagggaggagtggcatctcagtctgctggtccctatgcatctactttgatatgtccctcaggatccctgtgctaggaaaccagaggtgtctgaaatccaaataacacaaggataattatggatgaaaacataggaaagagttcccagggggctgaaacttacctgattcctctcatttgcttcctggttcaggaacagaactgatcgcacttcgtacttgagaaagaggggagagctggagcgtctttatattcttttctggccttcctccacccattgtcctactgaggacattcaaaagactgtagctcaaggctgaagtttcctaatacacgctcactcttttgtccttattgaatgagatataggcaactttgccttttaggcccttgatatggtttggctgtgtctccacccaaatctcatcttgaattgtagttcccataatctccatgtgttgtggaagggacctggtgggaggtacctgaatcatgggggcagttacccctatgctgatcttgtgatagtgagtgagttctcatgagatctgatggttttataagtgatttttccccactttgctctgcacttctttctcctgccactatgtgaagaaggacgtgtttgcttccccttccgccatgattataagtttcctgaggcctccccagccctgtggaactgtgagtcaattaaacctctttcctttataaattacccagtcttgggcagttctttatagcagcgtagaaacggactaatacagctctgttatcattgaattttgattgtgaattcgttttgctcggaatccactgagaacttgttttttcttgtaggggtcagatctcaagtataggtgttactagtggttggcatgtactaatattctgcatgtcttgggacgaagatgagatctggaggaaatgagtcatggtctccctgaggagaaagctctgggtcttgctgacatgttttcatgtaacttctttctagcagttactccaatactgtccagacccacagggcttaccttcctggaagacaggacagagatcacagactcctcatagtccatgctcttgctgttagctgtagtttgaccacaaatgccagtaaggcatacaggtcagttataaatgtcagggtccactcaggctggccagccaattcaggcaggaacaagaactgttacctgaaggggtccaacataggtagccagagagctggccaaggccagtacaactgagaacgtaatactaggaaaaagccctacctgagggagatgcctcatggctggggctggccatctgttggccccatgtcaagaagctgctggggctgggtgcagtgactcccacctgtaatcccagcactttgggaggttgaagtgggtggatcactagaagccaggagttggagaccagcctgggcaacatagtgagacctcgtctctactaaataaataaataaatccagaggatcccacctccctgcagccctttcaaatggaggctgtttatttgcatacagcccaagttcctcctggtgggaggtggggttgctgttctttctcctcactccttgaggctgcctccagatcatagcttctttcctccctattcatttgaccagtaattgacagccaatagctataaagagcctaggggccaggcatgctggtaaggaccttgggtggatgacatcatttcagcctcagcacgactcaatgaaatattgttgttgctatccccattttaccacagagcctcagaggctcaggttaataacttgctacttcatatattgtctcaaatatatgaatggaaccaacaatatatgatgttcctacttcatatattgtctcaaaatttttaagaacagcttgtttgaatttgaattcagttaatgtcatacatcgcaactggatttaagatgaggtcattttcactgaggagttttccagaatctgtatgttgtcaattacatccttatggtatcattgaacttgtttccctgtcatctgtatttcctgtaactggtatttagatccaaaggtttaaacagattcaaatttgattttttttttggcaagaatacttcataggtggttgttatgtacttccatcagaaggcctataatgtctggttgcctcgctttttgtgatattagcagtcattgatgatcattgccagaatttattttaataaaggtttcaaaatggtgataaattctatccttcatttactggctgcaatacttttgtaaagagactccgcttcttaatatttagttaccctgaaatacattgcatacaaaaagcaggatgaatgcttgctcttccctccttttacttactggttatcaaaatatagctggtttcttaatgttttccataagtgactaatgagtttttaaaaaaatgttatttattatttatgattatttcaatagcttttggggtacaagtggtttttgttacatggatgaactatatagaggcgaattctgagatttcagtgcacctgtgtgagttagtgtacattgcacctagtgtgtagtttttatctctaggccccctcccagcctctgctgtctgaatctctgaagtccattatatcactctgtatgcctttggatactcatagcttagctcccgcttataagtgagatcatacagtttttggtttttccactcctgtgttacttcacttagaataacggcctccagctccatccaagttgctgcaaaagatattatttcattgattttaatggctgaatagtatttcatggtgtacgtacaccacattttctttatccactcattagctgatggacagttagggtggttccacatctttgcagttgtgaactgtgctgctctaaacatacatgcgcaagtgtctttttcatttaaggacttattttcctttggatagatacccagtagtgagactgctggatcaaatggcagatctactttaagctctttaaagaatctccatactgctttccgtagaggttgtactaatttacattccctccagcagtgtctaagtgttctcgtttccccacatccatgtcaacatctattgttttttcacttatccataatggccattctcgcaggaataaggtggtatttcattgtgttttttttttttctttttttcttttttgaggcagagtcttgctctgtcacctacactggagtgcagtggcaccatctcagctcactgcaacctctgcctcctgggttcaatcgattctcttgcctcagcctcccgagtggttgggattacaggtgcctgccatcatgcctggctaatttttgtatattttggtagagacggggtttcaccatgttggtcaggctggtctcgaactcctgacctcaggtgtccacctgcctcggcctcccaaagtgctgggattacaggtgtgagccacc

SEQ ID NO: 926 - DNA, 3275 bp, Homo sapiens
cacttccgccctgttgtgaagtgggtgtctcggtggagccttggggagcagtcccttttctaggagcctcttgaaggactcaccgtagatgcaggaagacattggatgaggtcagcatagctgaagtgaggtgtctgggttagacaatggctatggccctggaattgcaagcccaggcatctccgcagccagagcctgaagaactcctgattgtgaaactggaagaggactcttggggatcagaatccaaactctgggagaaggaccgtggctctgtctctggcccagaggcctcccgccagcgcttcaggcaattccaatacagggatgcagctggaccccacgaggccttcagccagctctgggctctctgctgtcgttggctgaggccggagatccgtctcaaagagcagatcctggagctgctcgtgctggagcagttcctgactatcttgcctagggaggtccagacctgggtgcaggcacgccaccctgagagtggtgaggaggctgtggccttggtggaggattggcaccgagagaccaggactgcaggacagtcgggactggaattgcatacagaagagaccaggcccttaaagacaggggaagaagctcagagcttccagctgcagccagtggatccctggcctgagggacagtcccagaagaagggggtgaagaatacatgccctgaccttcccaatcacctaaatgccgaggtggcaccacagcctttgaaagagagtgctgtcctcactccccgagtccctactctcccaaagatggggagcgttggagattgggaggtgacagctgagtcccaggaagccctgggccctggcaaacatgctgagaaggagctctgtaaagaccccccaggagacgactgtgggaacagcgtgtgcctgggagttccagtttcaaaaccaagtaatacctccgagaaagagcaaggaccagagttttggggtctaagtcttataaattctgggaaaaggagcactgcagattacagcctggataatgagccagctcaggcattgacctggagggattcaagagcctgggaggaacaataccagtgggatgtggaggacatgaaggtgtcaggtgttcactggggctatgaggagaccaagactttcctggcaattttgagtgaatctcctttctctgaaaagctccggacttgtcaccagaaccgccaggtatatcgggccattgcagagcagctaagggcaaggggcttcctgcggacactggagcaatgtcgctatagggtcaaaaacctcctacggaattaccggaaagccaagagcagccacccaccaggtacctgccccttctatgaggagctggaggccctggtcagggctcggacagccatcagagccacagatggcccaggagaggcagtggcacttcccaggctcggggatagtgacgcagagatggatgagcaggaggaagggggctgggatcctgaagaaatggcagaagactgtaacggtgctggcctggtcaatgttgagtctacccaggggcccaggattgcaggggccccagctctgttccagagtcgtattggtgtgcactggggctatgaggagaccaaggccttcctggcaattctcagtgagtccccattctcggaaaagcttcgtacctgtcaccagaacagccaggtgtaccgggccattgcagagcggctgtgtgctctgggcttcctgcggacactggagcagtgtcgctacagattcaaaaacctccttcgaagctaccggaaagccaagagcagccacccaccagggacatgccctttctatgaggaactggactcgctgatgagggctcgggctgcagtcagggccatggggactgtccgagaggctgcaggtctccctaggtgtgggcagagtagtgctgagactgatgcccaggaggcctggggtgaagtggccaatgaagatgctgtcaaaccttcaaccttgtgtcctaaagccccagacatgggttttgaaatgaggcatgaggatgaagaccagatttcagagcaggacatttttgagggtttgcctggagccttatcaaaatgtcctacagaagctgtttgccaacctcttgactggggagaagacagtgaaaatgaaaatgaagatgaagggcagtggggaaatccctcacaggaacagtggcaagaaagttcttctgaagaggacttagaaaaacttattgaccatcaaggcctgtaccttgcggagaaaccctacaagtgtgacacatgcatgaagagcttcagtcggagctcccacttcattgcccatcagcgaatccacacaggtgagaagccctacaaatgccttgaatgtggaaaaaactttagtgaccgctctaacctcaatacccatcagagaatccacactggagagaagccctataaatgccttgaatgtgggaaaagctttagtgaccattctaatctcatcactcaccagagaattcacacgggggaaaagccctataaatgtggagaatgttggaaaagcttcaaccagagctcaaaccttctgaaacatcagagaatccacttgggaggaaatcctgaccagtgtagtgagcctgggggaaactttgcccaaagcccatcttttagtgctcactggaggaattctacagaagagacagctcctgaacaacctcaaagtatcagtaaggacttgaattctcctggaccacacagcacaaactcaggggagaaactttatgagtgttctgaatgtggaagaagcttctctaagagctctgccctcattagtcaccaaagaatccatacgggagagaaaccatatgaatgtgccgaatgtgggaaaagcttcagtaagagctccaccctggccaaccaccagcgcacccacactggagagaagccgtataaatgtgtggactgtgggaagtgcttcagtgagcgctccaagctcatcacacaccagagagtgcacacaggagagaagccctacaaatgccttgagtgtggaaaattcttccgtgaccgttctaacctcattactcaccagaggattcatacgggagagaagccgtataagtgcagagagtgtgggaaatgctttaaccagagctccagtcttattattcaccagagaatccacacaggggagaaaccctacaagtgcacagagtgtggcaaagacttcaacaacagttcccacttcagtgctcaccggagaacccatgcaggagggaaggcgtcgtag

SEQ ID NO: 927 - protein, 1024 aa, Homo sapiens
MAMALELQAQDQPEPEELLIVKLEEDSWGSESKLWEKDRGSVSGPEASRQRFRQFQYRDAAGFAFSQLWALCCRWLRPEIRLKEQILLVLEQFLTILPREVQTWVQARHPESGEEAVVEDWHRETRTAGQSGLELHTEEWLKTGEEAQSFQLQPVDPWPEGQSQKKGVKNTCPDLPNHLNAEVAPQPLKESAVLTPRVPTLPKMGSVGDWEVTAESQEALGPGKHAEKELCKDPPGDDCGNSVCLGVPVSKPSNTSEKEQGPEFWGLSLINSGKRSTADYSLDNEPAQALTWRDSRAWEEQYQWDVEDMKVSGVHWGYEETKTFLAILSESPFSEKLRTCHQNRQVYRAIAEQLRRFLRTLEQCRYRVKNLLRNYRKAKSSHPPGTCPFYEELEALVRARTAIRATDGPGEAVPRLGDSDAEMDEQEEGGWDPEEMAEDCNGAGLVNVESTQGPRIAGAPALFQSRIGVHWGYEETKAFLAILSESPFSEKLRTCHQNSQVYRAIAERLCALGFLRTLEQCRYRFKNLLRSYRKAKSSHPPGTCPFYEELDSLMRARAAVRAMGTVREAAGLPRCGQSSAETDAQEAWGEVANEDAVKPSTLCPKAPDMGFEMRHEDEDQISEQDIFEGLPGALSKCPTEAVCQPLDWGEDSENENEDEGQWGNPSQEQWQESSSEEDLEKLIDHQGLAEKPYKCDTCMKSFSRSSHFIAHQRIHTGEKPYKCLECGKNFSDRSNLNTHQRIHTGEKPYKCLECGKSFSDHSNLITHQRIHTGEKPYKCGECWKSFNQSSNLLKHQRIHLGGNPDQCSEPGGNFAQSPSFSAHWRNSTEETAPEQPQSISKDLNSPGPHSTNSGEKLYECSECGRSFSKSSALISHQRIHTGEKPYECAECGKSFSKSSTLANHQRTHTGEKPYKCVDCGKCFSSKLITHQRVHTGEKPYKCLECGKFFRDRSNLITHQRIHTGEKPYKCRECGKCFNQSSSLIIHQRIHTGEKPYKCTECGKDFNNSSHFSAHRRTHAGGKAS

SEQ ID NO: 928 - DNA, 44617 bp, Mus musculus
  misc_feature (1)...(44617): n = A,T,C or G
caaaggttacactggtgtggtccctcccagaaagggttgagtatctggagaggaacctaagacgcaagagcacacagcaaagcaaggcacagtcagacataggactttgcttccccactgtcccctcatccatctgggtcttaactctacagtccctgctggccccgaagtcactgtggagatcaggctgtcgagaactcagagattcaaggcatataccaccatgcctagcctgttactgattggtgtgtgtgtgtgtgtgtgtgatgtgtgttcatgtgtgtgtgacatcaggtgtcactttctattcagttctcttgagaaagaactgtccctgaacatagagcttgctgacttcacccacctacccaccccccaacctctgtatgccctggctgggtcaccagcaatccctggggatcttcctgtctgctctcagtgctgtgcggggccccagccagtgttgtggggcaggaggtgggggttgcaggtgtgcaccacacacgctcagcttttaccaggatccaggtttgaaaatgctctcaccactaagttaactccttccccctatttgctttgtcgtgggtcctgaaatctacccttgaagatacggttatcttagctgtgcctggtggtgtgggtctatcatcacagctatttaaaagactgaagccaaaggattccaaaacttaggctgggctatggactgagttcaagcctaggcaacttactgggacccagatacacacctggatgacctgatacacacctggatgacctgatacactcctggatgacctgatacacacctggatgacctgatacactcctggatgacctgatacacacctggatgacctgatacacacctggatgacctgatgcacacctggatgacctgatgcacacctggatgacctgatacacacctggatgacctgatacacacctggatgacctgatacacacctatgaatcctagcacttgagagttttaaaactgggggttgggggggcgttgatgagaatatacaagaccaatgtgggcaactgtgtaggaccccatctaaaacaaaaaagacaaaacaaaactgagccagcaagattgctcaatggttaaagctacttacccctgagttcaagaacctacataaaagatggaaggagaaaactgagtccacactgttgccttctgttctccacactcttcatagggcatgtgtgtgctgccttcaacaacatcaacaataacagtgaaaataaaatcttaaaaacaattgaatgccagggcctagcaaacacagaagtggatgctcacagtcagctattgaatggatcacagggcccccaatggaggagctagagaaagtatccaaggagccaaagggaactgcaaccctataggtagaacaacaatatgaactagccagtacccctgagctcttgactctagctgcatatgtatcagaagatggcctagtcgtccatcactggaaagagaggcccattggtcatgcaaactttatatgccccagtacaggggaaagccagggtcaaaaagtgggagtgggtgggtgggggagttggggaggagggtatgggggacttttgggatagcattggaaatgtaaatgaggaaaatacctaataaaaaatatttttaaaaagatatacatatgaagaaaaaaaacaattgagtggactgggtgtggaggcgcacgcctttaatcccagtactcgggaggcagaggcaggcagatttctgagttggaggccagcctggtctacagagtgagttccaggacagccagggctatacagagaaaccctgtctaaaaataaaaaaataaattgaatggtaaaattatttgtgacatactaattgtaaagtttgtaagagctattcaagggaagccacagaccaaaggacagagactgagggctggagaggtggctcagcagttaagatcactggctgctcttctgaaggccctgagttcaattcccagcaaccacatggtggctcacaaccatctgtaatgggatctgatgccctcttctggcatgcaggtgtacatgcagatagagtattcacattcataaaataaataaataaaataaaataaagcacagagactgtataggccaaagagcatctctcactccaagaaagggagggcagggaatgtatggcatcaggaaaagattgccaagacaggaaaagcagtgagcccatttctagaaacacctccaaagagctgtcccctgacctccacaacacagagagggagggggagggggagggagagggagagggaaacgtccggagggatggactggatggggcatacctttaatctgatcaggagatggagctaggccgatctttgtgttctaggccagcatgacctacaatagtgagttccaggaagaggaggccgcgggagaaagctgacccatgaaagacaccccatgggggagaaggattctggctggactgacaaacggggcggaggacagggtaccagagctcagcagagaggatgaagagcctgagcaggctcctctgctagcaccgaccagtgcagacgtgcgtgcgcacggnnnnnnnnnnnnnnnnnnnngactgacaaatggggccggaggacagggtaccagagctcagcagagaggatgaagagcctgagcaggctcctctgctagcaccgaccagtgcagacgtgcgtgcgcacggacagaaatccagggcgagcttgcctgcgtggagggttcaccgtgacgcgtgtaagcgtgtaagcaggggacggcagagggaaggtgtgtgtctcctaagcctgcaatggagaacggagaacgacgtggtgatcccatccatttcccgttccaggaagcccgagctaggcctctccagaacttctccagccagctcaacacgcacagagtggctcctacccagaacctgtgccccagcaaatggtagcaaggatctcctccctctcacccagttcccttaacacttgagtaggacctgtactttgtttgacgtggctttcttccatggccgcctcttcctggaactcactattgtaggtcatgctggcctagaacacaaagatcggtgtatctccatttcctgagtagattaaatgtatgccccacccagtccagccctccggatggttctctcctgcgctcccccctctctttccctctctcagatcaccaggtatgtacaccaagggtctttactcggtgaactctctctcttgggtcctggcactgaccctgtcctgcctcagcctctagagacttaggcaggggccagtgcactgggctgtggtgacctctccttgaataccattgcaagaggagagaaatagactcaacccttagatacaataagggccaaaggaaggctttggtcctagaagctcaacaaggggtctgtagatgcagttaaaaagggaagacaccaaggtcagttgactctggcttaatggcaggccaggagttttcacctccgaggtgaaagctaaggagtttcaaatgtcaaaggtcaaatgtcaaaggtcaaatgtctaggagaccatgacttagtaagatgttgttgttgtttttcaagacagggtttctctgtgtagccttttgctatcctggactcgctctgtagaccaggctggcctcgaactcacagagatctgcctgcctctgcctcctgagtgctgggatgaaagcctaaagccgtgtgccaccatgctggaacacaggatttgttcgattgtttttgtttggttttaagtagagttaattgtattgagaagatgtaagaaagaactccagagagtgtgaggaactccatgggaggaacaaccaggcttctttctttgtttgagacaggggcccactcaaggctatcctccagcctcaaccaccccaggactgtcatgacaagtgtgcaccatggagtcttcctgtagtgctctctgctaatactcgatagagtagggcagagccaaggccaaagcttagctgaaaatacgaggaccctgaactgaagtctggtcaaagagaatattcatgagacacatgcatttatcttgtattcacacttctctctaccacttacttttttttttatttctttctttgttttttgcatcagaagatttcttattcttgtgcaagtgtgtgtatgtagagatcagagaacaacagctgaacaaagccaattctctccttccacaccccttggggcctaaacagctcagccacagccagtagatggcagcacgtcacagtacgaagccctcagggtgatccactgtaataggagtgggaggacttgtgttctgagtggacccagccaggtggacaggatacaaaggggagatgctgggatgcccttattgaccacgtgacctgaggtgggctcaaggcccgcagcagggcctcacttaggagctggctaggaatgtagattctttcttctttctttctttctttctttctttctttctttctttctttctttctttctttctctctctctctctctctctctcttctttctttctttctttctttctttctttcttcttcttcttcttcttcttcttcttcttcttctttttcttcttcttcttcttcttcttcttcttcttcttcttcttcttcttcttcttcttcttcttcttcctcctcctcctccccttcttcttcttccttcctcctccccttcttcttcttcttccttcctcctccccttcttcttcctcttctcccctcctcctcctcctcctccttcttcttttccagtactaaatacaaggtctttatctcttccagattaaacattttgggtgggctggagagatgactcagtggttaagagcaccgactgctcttccgaaggccctgagttcaaatcccagcaaccacatggtggctcataaccatctgtaatgataactgaatctcttctggtgtgtctgaagacagctatggtgtacttacatataataaataaataaatcttttaacaaaaaaattaaagattttgggtataatcatataaagataaagaatcaagttttgcgacctaaaaacatttactttttaaaagtatattaaaccgtggtggctcacgcctttaatcccagcactcaggaggcagaggcaggtggatttctgagttcgaggccagcctggtctacaacgtgagttccaggactgccagggctatacagagaaaccttgtcttgaaaaaccaaaaccaaaaccaaaaactatattaatactctagtaaactatacaaaaatataaggtgacaaacatgtacatttatagaactgcatatcagtcaggccagatcctgcagaaggaattcccagcatggcctcattcatctgtgaggacacagagcagtccttgtttggccagacaccatcttctcctgcatgagctgctcttcacagcttgatggcttccttccatagttgtctacctctcaggacagacatttaccttcctcatccaccaaccattggaggagggcctgggccacgaagatgattgattccacccattcttggtggagggtttcctgatgggaaaacaaaaaacaaaaaaaccctacaaatcctgctattccccccagaagaaatctgttatgaaagacagtctccatgggaactgattctggctgcccagcacttgaccatttgagatataaaccaactttcctccatttacctgcttcctaaggacagagaagtccggacctcctggggttgccgtacctagcctctctccacagattcttgacccaatcctcccacctccagccagaaatcagagtcagagtcagagtcagggccagcaatctgtttgtcaggtccctgggtgattcagatgtgtgtggaggttttaaaggtaccttttctctccaacttcctcattccaggaatggggaaattgagaccagatgaaggaagtgacttatcacaccagagagagcccaggaggtggtggtggagtagcagaggggcggagagatgcctcagcagttaagagagcttgctgcgctttcagaggacctaagttgggttcccagcacccacatgacagcctacaaccacctctaactccagtttcagagattcagagattctttacatattcttaaaatttcaatctctttaaaatatccatctcttttaaaattcaaagtctttttacaattaatagtctcttaactgtgggctccactaaaacagtttcttccttcaagagggaaaatatcagggcacagtcacaatcaaaagcaaaagtcaatctccaactgtccaatgtctgggatccaactcacgatcttctgggctcctccaagggcttgggtcacttctccagccaggccctttgtagcacacgcgtcatcctctaggctccagatgtctgtactccactgctgctgctgctcttggtggtcatctcatggtacttgcatctccaaaacactgcatgaccccttcagtcctgggccttcaattgcaactgaggctgcaccttctggcttcctcaagtactgcacatggacacacacacatggctgaagagatggctcagcagttaagagcactggctggtcttccagaggacctggcttcaattcccaacacccacatggcagctcacgattgtctaacatctgttccagggaatccaacaccctcacacagacatacatgcaggcaaaacaccagtgtatataaaaatacaaataataagttattaaagacaataaacacacttcaataataaagtacataacttttaaaagagagaactcannnnnnnnnnnnnnnnnnnnctcttaaccactgagccatctctctagccctcaaacatttctgctgtattctcacatgctgaatctagcaacattacccacagcataaaaatctccctcctgaagaagccctgaccatccctcctatagagaagacttcatgtggtggtcataagattccacttaaggagctggtgagatggctcagtgggtaagagcacccgactgctcttccgatggtccagagttcaaatcccagcaaccacatggtggctcatagccatctgtaacaagatctgacgccctcttctggagtgtctgaagacagctacagtgtacttacatataataaataaataaatctttaaaaaaaaaagattccacttaaacattttatctaatgatagctgtaaaaatgtatgaggaagatacaataccagagtatgttctagaactggacattagaaacatacttcctaagccaggtagtggtggcacacacctttaatcccagcacttgggaggcagaggcaggcagatttctcagtttgaggccagcctggtctacagagtgagttccaggacagccagggctacagagaaaccttgtcttgaaataccaaaaagaaaaaagaaaaagagagagagagaaggagagaaagaaagatagaaagaaagaaagaaagaaagaaagaaagaaagaaagaaagaaagaaagaaggaaggaaggaaggaaggaaggaaggaaggaaggaaggannnnnnnnnnnnnnnnnnnngggctgtctcacaaatcacctaattaacaccctaacaccctgttaactgttcactgtaacaaaaaaggaaaaagtttgttccaggcctagagatggaagctaagggctgctcacctgctgggcaagtactctaccacagagctacatccctagccctgaataactcttagtacatacatatctcaaacatttctctttttttgtttaaagacttaattattatatctaagtatattgtagctgtcttcagacacaccagaagagggcatcagatttcattacagatggttgtgagccaccatgtagttgctgggatttgaactcaggaccttcagaagagcagtcagtgctcttaaccactgagccatctctctagccctcaaacatttctgctgtattctcacatgctgaatctagcaacattacccacagcataaaaatctccctcctgaagaagccctgatcatccctcctatagagaagacttcatgtgatggtcataagattccacttaaacattttacctaatgatagctgtaaaaatgtatgaggaagatacaataccagagtatgttctagaactggacattagaaacatacttcctaagccaggtagtggtggcacacacctttaatcccagcacttgggaggcagaggcaggcagatttctcagtttgaggccagcctggtctacagagtgagttccaggacagccagggctacagagaaaccttgtcttgaaataccaaaaagaaaaaagaaaaagagagagagagaaggagagaaagaaagaaagaaagaaagaaagaaagaaagaaagaaagaaagaaagaaagaaagaaagaaagacggaaggaaggaaggaaggaaggaaggaaggaaggaaggaaggaaggaaggaaggaaggaaaaggagaaaacacacttcctgggatgggatgagaccaatctgcagagttcttactctgcaagcatggggccctgaggtcaatcccctggaacccagctttaaaagggaaaggtgattcagtggttaagagcactggctgctcttccacaggacccaggttcaattcccagcacccacatagctgcttgcaattgcctgaaaccccagacccaggagatccgaagcctcttctgatcattgagggcaccaggcacacatgtggtgtgcatacacacatgcaggcaaaacactcactcacatgcctatatgtacatgcatgcacacacatgcacactcacatgcacacgtgcacacacgagcatccacaggcacatgcacacatgcttgtgtgcacataccaggcatggtgaagaatactataatcccaacactgggtagatggagacagccagcctagccttgcgggtgaatcctgggttccagtgagagaccttgcagcaaaactcaaggtagatctaggaggatacaagctggcattcaactgagccagcaactggccccctccacagttcttgctatgtcttcatagcaaattcctctgttagaggtaatgctgtgtggaatggtgtcttagctagggtttcgttgctatgaagagacaccatgaccaaggcaactcttacagccaagcatattcaaaccaccacaaatagcaaacaagcctagcttcaggtacctgcttgggttcctgccttgatgtctctctcaataagaaactgtcacctgcaagctgaaataaacacacacacacacacacttttgattttctgctttgtgatttttgaggcagggtctctatttgtagccctgaatgtcctagaatttgctatgtagaccaagctggccttgaactgcctctgcctcccgagtgctggaactaaaggtgtgtgtcatcatgcccagcttctgaacttgcttttgtcacagtcacagaatggagcagaaccaggagccagcagcgttcattcatgtcatctgccaacacctgcaggcatttgcatctcaaagctctgggcgagagggaggaggcatgaggcacacacatagcctggcacatgtcacagacaaaaggatgtaaactttacagaggtcaagtgagttgcaggacagcatacacccggggccagattagaacccaagtttctggagtctaaggtctatgcctatgccctcccctggccagagttcctaggaagagagaattcaaccgcagggcaagaacactgtggcactgaggacccagaggggaagtggtaaccggtacggaaggccagatctcctctcactcacttatctgcaccagacctcctctcattcactcatctgcgaaagtgtgagagcaagaaaccccaggctggagctgcagctcttgggacctacgtgggggtccctgctgggtctccagatctggatacagaatagccaggacaaggctccacaagaccctggggcccagcggctgacaaatgacagtgagtgtaacttcctttgttgttttacttcagactcctcgctccagaaagcctatgttctaacctcaactcttccctaactcttcgctaagtaaaagggaactgtctgaggcagggggatggatgtcggactgggaacatgggtcatagctcaagactggttctcctgagatagaattttccttgcctttcttcacagtaataaacccccaaaacttaggtggcctttttgggggagtctatttctatttacccctgaaacagatagccactctaggccaaagaaaatttgcttccagtccagcttagtgaatgggacaaatttattggtgttgtctgtaggaacatgggtggcttgggcaactgtatcatcaaaaagcctaccccagcatggtgacaagtgcccaaagttagtgacatcgctggtgtccccattagttgacagtccacctctaagcagcagacaggacggtgtgcagggatgaagcaggagggagggatggagtgttggaacgtcaggggagggtctaatgaccccacacacagggactggtacaggcacgattttttgaaggcctcctgtagataatcaaagctgttgtaaagaaagggccacacaagcccagggaacagaattccacgccacacagatcttctctgtgggttgggctctgctccaaggccctttcaaggtttcctttattggctgctcacaagtcaacctctgtggttaaatgctaccctaccccacactcggcagagggaggctgcgtgctactcccctgaagtcccaggggcatctcttgagaatattggcttgaatatgagtattttggcttcctggtctactctactgggccatccatagcaggtgggggtttgaaaaggactccagaagactaaagccttgggactcacctgggcaatctgaagcctgtggggttttgtttgtttgtttgttgtttggttttggtttttcaagacagggtctctctgtgtagtcctagctgtcctggcactcactttgtagaccaggctggcctcgaactcagaaatccgcctgcctctgtctcccgagtgctgggattaaaggcatgtgcctccacgctcggcttgaagcctgtgttttatagaaggaaaaaaaattgaggtgcagtgaaatgattggctgtcagatacgacgacaggcactggactgtgagacccgggctttgcttccttggaagtcactcttattgagggaagacagatgtcaaggtgggagtcctggggcggaggctcctgtttaatcctaactcttaacattctatggcttggcacaaataactccacttctctggccctcagcttttccttctggggcagagcaggtctgagaacgccaccctcaggcttgtggtcagggctcagccaggtgacactggttagggagagacaacggcactggggctccgtgaatagctttggtggagagtttggccttgtcccctctgcccatgctgtggactagaaatatgaaaaggaggtaccacttccttccctaggatagaaatcggtctcaagagagatgtgccatggtcatgaaagccaggactgggcagaagaagggctcatgacagactcaggaagtctgggggcggggggaggggggagggggacatggcctcagttctgcagttgcttgtggctcaagggagcttgctccctaatctgtgtggtcccatgcgtgtgactccccacctgtgaagcaacccttcctctctcctcagttaaactgccaaaatggctgcctccccatctcactgttccctgttttatttatttgtgtgtgtgagagagggtgcatgcccctgtgtgggtaagcttgtggaagtgagacaggttgacattgatgtcttcttcagttgctctccatgttgtttcttgagacaatttctctctgaacctgaagctcactcagtcagcaggtctggctggccagagagtcatgtctccccttggctgtgctgggattacaggcgcattatcataccaacttttttcctgtgggccctggggactccacagaaggtcctgtgcttccatagcaggcttttaaacagctgagctgtgtcctcaactcttctgcccccgttactctgactgcgtgttctaagggtgcccgaaccttgtattgattctgatggaatccaatagaactctgagcatcaccctgccaagccagtgggagtagcctcacaggtcacatagagagcttcactaatactctgacaccaacaaaagatacatttggtccttaggtcggcgtttccctgctgggtctggcctcaccattttgctggaatagctgtagtcccagattcattgtcaagacttaaaacacctatctcgctgggcagtggtggcatactcctttaatcctagcacttgggaggcagaggcaggcagatttctgagtttgaggccagcctgatctacagagtgagttccaggatggccagggctacacagagaaaccctatctcgaaacaaaacaaaacaaaacaaaacaaaacaaaaccctgcctatctctaatatttgactttcagcaatctcccctagggagcccctttccccaaactttccagggatcagagtccacctagcccccagctacatcccggaggggcccacatccccgaatccctctctagtccaaggcgttttgctcccgcccacctgagcatcagcttcacctccctgagctggattctctcaaaggactagaagagggattttcaagcagcctctgcttatgattgtgaaaagccctgaaggccggagacacagaagtctgtctgcagagagatagacagcgttattgtacagataaggagaacaaggctcagcagcagtatggacttgcacaatgtcacttagtcaaagcagtggggagtggcaggcagacgctagctagtcttgtgacagatccaagccagcctccccggctaggtagttgacgtcatttcctgaacctctgtgtcttcagctccaccaatgcagcctgtggcagctcgtggccactcgcaatttcaaggtggaaatctgaagcccaccgggacttaaaagccacctgagttggtgggttctcaccccagagacacagagctcaaggccagtcagggttatttgtgaaagaaaccatctcagttaaaactagcaggctggtcttagccaagccctgctctgtcatgagagtgaacagctggacaatggtagagaatccctcataggtgtgaagacccagtccaggtcactgctgtcacataactgtcccttgtagaacaggttttgttttttttttttttaagatttatttatttattatatgtaagtacactgtagctgtcttcagacactccagaagagggcgtcagatcttgttacagatggttgtgagccaccatgtggttgctgggatttgaactcctgaccttcgggagagcaatcgggtgctcttacccactgagccatctcaccagcccgtagaacaggtttttgatgccatggtatgtgcagctcgagagcagggccacagtggagagggaagcatactgtgtgttaggccctgaggttccaaccacaaacccaggggtttcctcatcccatggccttctccacaggacttccctctctgggcttgtggctgtcactgacattagctcgtaccataataccctgatcctacgaggacactttccccctgtcccaagacacaagtgagggagtccagggtttaactgcttagccaaggccaaagcaggagccccagcaaaagcagggtgtttggtggtggttttcctgggattccctccttggtctcccccgaccccctgcagagccccgaataggaagaaattgtcctttcttccatctcctaggaaaaagaaagtcccactgtaatggcttgtatatgcttgacccagggagtggcgctattagaaggtgtggccttgttggagtaggtgtgtcattgtgggtgtgggctttaagaccctcatcctagctgcctagaagtcagtcttccactagcagccttcggatgcagatgtagaactctcagctctgccttgcatcatgcctgcctggatgctgccatgctcccaccttgatgataatggactgaatctctgaccctgtaagccagtaccaattaaacgctgtccttataagagttgccttggtcatgatatctgttcacagcagtaagaccctaactaagacacccacaatgcatgcctcacccaggcggtgaagacccccaaatgctaaggaggacagacaagcgaggtgggtgatgtgggtaggaagaagaaggggctgcagtggagtcgggctagctgccaggatccaaagaggagaggacctcactccaaagtgagtattaggctttacaggttgggtgtcctctaaggtttgtggcttctcttctcctctcctcccctacagctttctcgcactgccagacggggcagccttgattctatggctcccaggggctctcacttaaacccctgctgccctgttgcggtgattcccctggctccctaggggctgtgcccactcagttcctctttgagaaccacaggtgcattcacggtggtgcttctgtccagattcaatgagtccttcctgtgtctcccccccctccccgtgggtgtgttggggtactgggtggtccatcggtactacaggtaggggtttggggggacctatggagaaccacacatgtttctggaaaacaggtcaacagctctggaaggtgctttgagatgtaggattgcagtttactagggacttaggagagaggtgtgacttcgggacggaaacaagccaggagcatcccacaccccaaaagcaagaagaaggggttcatagactaagttacacaaaggtagagaggaaccaaccagcgtgtatctggcctttctcaaaaactaagaacgtgtgaaagttaagttaagggacaatctgggtgtcagggaagtgaccagactaaccagaacaaaatgcttggctattttggttttttttaagatacagtatagcccaggccaacctaaaattcaagatcgtcttcgccgggtgtggtggcacacgcctttagtcccagcactcggagggcagaggcagatggatttctaagttcgaggccagcctggtctacagaatgagttccaggacagccagggctacacagagaaaccctgtctcgaaaaacaaaaacaaaaacaaaacagatcgtcttcatcttccaagtactgagattataggtgtgtgctatgtttcttagctttggaaaactttttttttcttaagatttattatgagggctggagagatggctcagtggttaagagcactgactgctcttccagaggtcctgggttcattcccagcaaccacacgagctcatgactacctgtaatgagatctgatatcctcttctggtgtgtctgaagacagctacagtgtatttatttataatcataaataaatctttgggccagagcaagcagggactgagcgagcagggccaaacggagcgagcagaggtcctaaattcaactcccaccaaccacatgaaggctcacaaccatctgtacagctacagtgtactcacatacataaagtaaataaataaatcttcaaaaaaaaaaaaaagaaagaaaaggagaccaagagtgatggagagataaactgcaggcatccacacgcgtgcacacataggcacacatacgtgcatacacagcacatatatgcacagacaacacaggcggaatgaaaaataaaataaaggtagaaattcaggtgttgggggctcatttgggacgataagatctctctctattgtctagcctggccttgagctcactgtataatccaggctagcctcaaattcaggtccgaccacctcggcctcctgagtgctggattacaggcacataccaccgtatccagccatacattgacttttaaagcaccaaaccacaagaaacgtggatcctcacttctgctatctacagtccttttggtccacactaatgccttgtgtgggttcatctggacattttactaacgtttgttggtttgtttaattaaagacagacgtatttatttatttatttatttatttagatttatttatttattttatgtatgtgagtacactgttgctttcctcagacacaccagaagagggcattacagatggttgtgagccatcatgtggttgctgggaattgaactcaggacctctggaagaacagtcactactcttaaccgctgagccatctctccagcccagacgtatttattttacgtgttttgtctgggtgtagtgtgtgcaccgtgtatgtgtcaggcgcctgcaaaattcagaagaggaaaagagggtgtctgactccccggtactggagttaaggacagttgggcaccacatgttggtgctgggaatcaagccctggtcctgtggagagtcaccattgctcctaaccgataagccatctctccaggtcctttgctgttgttcttaatttttaataatgtctgcctgcctgtctgtctgtctgtctgtctgtctgtctgtctctctctctctctctctctctctgtatgcattcaagtgcaggtacccaaggaagctagagattgctgatccctctgaggctggatggtcttacaggcagcaatgggcagtctggtgtgtgtcactaaaaccagactccatcctcctcgagagcagaggttccagcctccggcctgtttgtaccagagcttattgggtgcatgatcttgctgtaggcaagcttggctgttagtaattttctactgcaaacttctggcacatgccttggatcccagtactcgggaggcagaggcaggtggatctctgtgagaggccagcctggactacaaaatgagttccaggacaaccagcgttatacagagaagccctgtagggggctggatgggagccaggctatccatgccggttatggttcctgtctgtttgtgtattttctccatttggctacttaataatgcagtggatccaaactttacacagcgacctaagagagtggagtccgacctgaccatcctgggcctggactcaatggcttgagtcccaagggtgtgaaaacgcacaaaccccagtgggaattgttgagtcttctcatcacttcctgtggctcatgagaaaggaagtgatttgaagtcaagtctactattttctttcttatttttgagacacactctcactgtgtaaccttggctaagctagaatttggtatgtagatcaggctggccccacagggatccgcctaggtctctgtcctgagcaatgtggttagagaagggagtaccccaacacctccagcaaatgtgctgtttgcagtaagagtaccatttgccctttcttcctcccccacccttaacatcagatttaaattcatgtggttgggatgtagcacaggggtagcatacttgcctagcacacatagggcttggtttgattcacagcactgccaaaaacaaaagggtgtgtgtgtgtgtgtgtgtgtgtgtgtgtgtgtgtgtgtgtacatatagnnnnnnnnnnnnnnnnnnnncttagtgtttaagagtatgtttgctctggtaaagcaagttcaaatcccagcactcactccagcttgcccactgtagtaagcctgcctccacggaatccaacggcactcacaagcacacacacacacacacacacacacacacacacacacacacacacacacacacaagaaataaataataaagtaaatcttaaaaacaacaagccaggtgtgctggcacacgcctttaatcccagcaggcagatctctgagttcgaagccagcctgatctacagagtgagttccaggacagccagagaaagcctgtcaatcaatcaatcaatcaatcaatcaattaattaattcttatcaacccaggctggcctcaaattcccagcagtcaccctgtttcacccttcaggggtaggaggagcgtgcagaaagatctgtcctccagactcagctaactctccatgacaggactgtccctgcttggcttaattcatccatcagctactgtcctgaggtttctgggtccctgacagctactttgtcgataccagatcctagcagcccagagcccttgagtacgttttcccagcaagatgtggcatggcttaacagtgatactgccaccaccatcacccctaagattgtgtcacaagtgcccttcatggctcacagtatccagactcctcactcaacactgacagcaatggtgtggttattgtcgtaacacacagaaggtttgaaggcacttcacgtccctttcccacaccctctcttctgttgggggaacctgtctgaactgcacctcccactctgatgctgcgatcatttaaatcaatcaaaatcaaggctgggtagggaccccactctgtgaaacctggacgaggcaggaagaggtccagagccatcagggaaaaccacaggggatgaagaaaaagccaacacaagtcgaccctgtcccatccctgagttgcagagggaccactgtatgtatgaagactctgttatccttccactttgatgtccccctggccttactacctgacttgccagaaaagttcccttcctacatagagcaaattatggacagagtggtggtcactccagggatggccacacaatggcagtctgccactcaggtcccctcgctcttccctaacaaaggtgaagaccccagcacacagcttaggcacggagaaggagggagccaccccagacagcctgtcccacctctgctcaccaagtctctctggtgctttttggttgtttggtttgagacaggatctcccttccctatgtggctctggttgctctgctcctaggtagccaaaaatagttaccatctgaacattacaaatgaataattagattaaaacaacataggagctggaccagctactcaaaaggcagaagtagaatgatcgtgagttcaaggctacacagcaagtgcttgtccctaaattaaaaaaagaaaaggaaaaagaaaaaaaaattaaaggctggattggccaggtgtgatggctcatacctttaatcccagtactcaggagacagaggcaggaggatcactgtgagctacagcccagcccagtctatgttgtcctggccacattagtgtgtgcatctcaaaagaaaaaaagggggggggagtggatctggggatatgatttaggtggtatagtgcttacctggtatgcaggaagctctggttgcaaccaccaggaccacaagaaaaaaaaatgatatgaatttgaataacaacagcaaaaaagggagggtgtcaacacacacaagccccttgtgcctgccacgaaggtgctctcttcatagacttgagccacagtggcctgttcagcaagctgagcctaagcagctattaatcaggcagtaaggaaatgttcattaaagggatattcctatgttcattaaagggatattctttctggctggagagtcggcttagctgtcaagattgagtactgctgtggcagaggacctgagtttgattcccagaacctgctgctgctgctgctgctggctccgcattgcctgcaactccatccagccacagggtcctctccctctgtcttccatcctcacccttctctcctgcctccagctcttccctcactagcctgaaggcacaacaaagatgactttgtggtccatgttccctgtcaactgtgagaggacttgaaccaggcacggtggcaggcacagcatcctgtagagtttgtcacacctaacctcacaggtgacataaggactccttctgctcccctttctttcttaatatctcagcctcctgccattacatctaactaaaaatagcatgtatttttaaaatggtcatattttcattctatgtctgatgtacgtgtgtgtccctgtgtgagcatgtgtgtgtaagagcaggtgccccccaaggggacagagatgttgaatccccaaagtccttagatgacagctcaaggtttagggacatacaccttccctagaatatcttatcaatgagccgagcctgatccagaggaaatgctaagttagcttatagtaagagcggagttcgggctggagagatggctcagtggttaagagcactgactgctcttccagaggtcctgagttcaaatcccagtagtcacatggtggttcacaaccatctgtaatggggtccgatgcactgtgtgtctgaagagagtgacagtgtactcacagatataaaataacaacaacagagttcagaaaaggatagaatgcctctcaaggcctgagaactgagaaagaaatcttaacaagaaaacaaaacctaaagcagggtgaaggtgcacgcctataatcccaaaacttaggaggcagaggcagctgggatctctctgagtttgaggtcagcctggtctacagatcaagttccaggacagccaggatgacacagagaaagcttgtcttggggaaaaaaaaaaagatcctcgccattctttgccttcgcccattgaggcttttattgacagaggaaacttcattctgcccaggattatgtgagccttgggttcaaagactgcccttttccttcttggaagaaattgttgagtttcaggaatcgccccacaaaccacacaaacaccaatctcagttagacagggatgctttattgaatgtacaccctaagactgatcagggccatagcctagggagctgaaagctacgaccctgaacatttctcagagccagcttataaaggctcaaacggtaagacccacaatgctgaaagtgctgcccagtggtcagccctgactcaagctattttagacgtaacagttcatacagagctttaattggatggctcctaagtggagctgtgggagtggctgtgggatttcttaagattaacaaagcttgtagcatacagaacacaataggagatgtgatcagcatggccctgctctgggtcacttctctgtgtcaatggctggcaggcatattacagctgcaatatgaaatagctggcagtcatggagcaaaatggttaccgatatagcgaggggttggctcaacttcaaagtaggttaaagactgtttctcctctgtggctgcagagtcaagatgtgtgtttgagataagagacagcggacacattggacacattttagtgttagttgcttcaggctaggaaggtaggaaggcagagttggttgcattcacaaacctcaatgtaccctttagcttgggggccaggagagggctctgaactgctattatgatcaccccccaccccgttttccttttaaaaacaaggtctcatgtaacctagactagccaaaaactcactctataggatttcttattttcctacctctctcaagtattgggatcacaggtgtgtgtgtgtgtgtgtgtgtgtgtgtgtgtgtgtgtgtgtgtgctatgtgccaagtttatacagtgctggggatcgaacccaaggctttgagaatgctatgcaggcactctactaattgagcgatgttcccagagcttttggtgacttcttttttttttttaatgtgctttctttttgtgtgtgtggcaggttcttttttttttttttaatttatttattacatgtaagtacactgtagctgtcttcagacacaccagaagagggcgtcagatctcattacagatggttgtgagccaccatgtggttgctgggatttgaactctggaccttcggaagagcagtcgggtgctcttacccactgagacatctcaccagcccttttggtgacttctttgaggtttattttgtgtatatatgggtatcctgcacatatgtctgtgcacatcgtgtgcatgcagtgatccagaagaggacattggattctatggaaatggtgttgctgacaattagtagctgccaagtgggtggtgaaaatcaaacccagatcttctggtcgagcagccgtgctctaaccacgaagctttccggcccctgtcctttctggtgagcagtttgaggattgcttgctgtatcttaaacacgaatggtaacacaagcgtttgaaaggggttttgtttgttcattacttttactgtgtttatgaatgctttgtctacatcatatgtatgttcatcatgggtacgccttagccatcagaggccagaagcgggaatcggatcctctggaaacagagttacaaagagttgtgagcctgctatatgatcatttgggattgaacctgggtcccccgaaccactgagccaacctaggtgtggcacacatccgcaatctcaacatttgagagctagaagcaggaggagctgtagttcaaggatgttcttagttacagtagatttaagtcaagcctgggctacataaggctctgttgttataacaattaattaacaacaacaacagcaacaagaagccatcttgaaattgtctctttcagactcagcttcccctcccccaacagcccagtgctcttttctgctctgctctaacaccgcccaaatctctgaatatttctatgtaccaatttcttcatccacaaatggagaaaacagtgttacctatctttggtgcccatgctgacatttaaacaagactgtgtagcctggagtggtgtttaatcccagtacttgggaggcaaaggcaagtggatctctatgagttcaaggccagcctggtctacagaacaaattccaggacagccagagctacataatagagagaccgtgtctcaaaataaacaaacaatgtgtagagcatagttcaataccaaactgttgtcatggtcctttttgggcggccattctgggtccagagaagaaatggcttctcacagaactggagccaaagtcaaggctgagactctgaccacgccgggatccttcgttttgtgtcacattggcgccgtcttccggtccctctggctgccatgcttctgctgttgctgcaactgcctttgtatgtatgcatgtagttgtagaggtcagatgtcagcctcggaagtccggtgaggtgatgatggtaagtagaaagcaggcttgacatgaattgagcttgaccatgcagaatcctgtgacaactaagagatgccagaagaaggcatcccagtggagatgggcatggcagctccatacaatacaaaatccttcctaactgtgggggagaggggaggctggctacactaagtattagtggagtgaaggtctgggtaggtagctcagtggtagagctcttatctaacatacttataatatgtatatatattagaataatattaatatatagataccattagactaatatatcactactaataatatataataatatgatatataactaatactataggcttatatatcatatatgtatgtatgtatatatatatatatatatatatatatatatatatatatatttacacattcagtacactgggatccagagactcaggaatcaccatcaccaacctgccctctttaaagatgagaagaaaaaaaaaacccagaaggagaagatttagtgaagagacaggaactagaacacagtccctcccctcccccttcccagtcctaggcaaaagtaaccaggctgctgggatatggctcagttgaagagcttttccttggtatgccaaaatgctctgggttccatccccagtacacacacaaaaattaattcagtttttttggaggcatcaaatctcagtttcccatggtgggtgctgaagtcccaggcttccttccgggccccctccaccagctgagcagaggcagaggccatctcttctgtgaccctgtttcacttcacactttcacttcacgtgaaaacaacaacctgccacaccttttcctgagagttcccagacccccccccccggggtctttcccagaaagtcagatcgagtccgggtcccagctacagcctcagacgtccagcagcagggacacagtcaggaacccgagttcctggactaggcatttcctggaggtgtggaagccaaggctggttggctctctttcgtcctaacatctgttgaacatcagattatcgcatgttcgacatcatgtccttgtacacacctctggctgtgaaggtttggaagcgctttcttatcactaacctgttgataagaaagatgaattaccaggcctggcagaggctacatagcaagacctgtgtctccaaagcctaaatgttaggtgtcaaaaatctgaaacaacccaagcagtcacaagagtgcagaaaagcaagatctttctttgaattaagcagcagggcaacagtacagactcgggagctggctgcatcgtccctcttagtaaggatttaaagggatgaaaacagtgtatccaggccaccaccgattgatcagggccagagaaacagacccagcagctgacctgccaccccgagccagaatactacagagtttttaagcccaaaatccacaatcatctgtgccaagttaccccaccagtcaggatttagggataggggacgtccttaggaacatgtctttgtggtacacctatcctgctcccattggttggggtattcagcagtggcaggggacttgcctagcattcatgtctcaactggacagctaggatgtccgttaccaagggagctgctgggacttatactttatttgacccctatacaaagtggaatggcttttatttggttccttcaataataataataggaggaggatgagaagttcgaggatggctttgaacatattttgagttctaaaatagcctggactagatgtagccctgactccgaaaggacatggctccgtgggcgaaagggcttggcacacaagcctactgacctgatttcagtcccccagatgtagtcataataagtgatacatgagtaaaatttaaagcgaaaagtactagcaatgataataataaataaaacaaaataaaaaataaaacatgatttttttttctcctgaaaagatgtataggcattaggtttatatagttagttagttagttagttagttagttagttagttaagacaggtgtggttgtgtttagttaaggcaggtgtggttgtgtatgcctttaatctcggcactaaaagaggattaaaggagacaaggcaggtagatctctgagttcaagcctagccaggtttgcagagtgagttccaggacagccagggctacacagagaaaccctgtctcagaaaaccaaatagatggatagatagatagatagatagatagatagatagatagatagatagatagatagatagatagataaaatagttttaaaacatttatttacatttatttttatgtgtataactgttttgctttcatgtatgtctgtgtaccgtgtgtgtgcctggtgttagcagacagcagaactggaattaaagacagctatgagctgctatttgagttctgggaaccaaaccccagttccctgcaagaacggccagtgttgttaatctctaaaccatctcttccagccccatgcatttggtgtgtgtgtgtgtgtgtgtgtgtgtgtgtactattaattgcttttgagacagggtctcactatgtagctggccaggaacttgccacatagaacaggctgtcctcagactcatagagatctagctgcctctgtttcccatgtgctaagattaaagctgtgtgccaccatagcaagctggaaaggtcttatatacactttgaaaggatcaaaaagaacttgccagttcccagtttcaaaaactagaacgaatgtcctcggtgcgcttggcctccttaagaatgggggggggtattgttattgtctcttcacaagtgagaagagggacttgcccaaagtcacatgatgagagtgacagcattggacccagagcagctacttatacatcaaacacatcccttgccctagaaataggtcttctagaaggcacccatgtgacttgcagagggtatctctatcttcgtggagacagggagccgggcttcctgttgctgtgtgcatcctgttgttctcttgttaggatgtccatcaaatgcatgcatttcctttcctaactctggacagtaacagtcgtctgcggccaagctgtacctgaatgagcagaggcacaggcaccagccgtggccacccagcaaacatctctgctgactcagactggggtaaggcattccctaacagttagttagttagttaggtaggtaggtaggtagtttgagacagagttttgctatgttgtctaagctggccttgaactcattatgttacccaacattaaacttacagcagccccagcctcagaatttactagattctgacacagagcagtctggcctcagcctcctgagtgctgggattacaggtatatgccaccatgcctggcaatccctaccagaacttttatttatttattttacttaaaaaaaaaaacttttatttattttttaaatttttaaaaattttttatttttatttacttactattagtgtgtgtgggggggtaagatgtatatgtgggtgtgggtgcatgtatcagatatcgtgtgtcctgctctgctgatgtctaacgtactcctttgtaacaaggtctctggctgagcccagagctaggctggcagccagcaaactccagtgagcctctgtctgctccagacagtgctgaagttatgggtgtgtgtgtggccaggcccaacgttttatgtgagtgctgggaactaactcaggtccttaaggatgtcttatccactgagccatctctccagccaacacccttgcaacttgatttcttatattatagtgtcatgtggatgaaatcaaattatgactgggaataatattctttaattgtatcagagttttatttacgtattttgtgtgcatgtgtgtatgtatgcatgtgtgtgtgcatgtcacagctggtttctgggagccagaggacaacttgctttgttggctctgtccctccatctttatttgggtccaggggttccaattcaggttgtctggcaggcacctttaccaactaatctgtctctccagccccaggagcagcagtctgcagaaattaaattccatactctcagttattgatgtagttgaggggcaggcagcatgtaaaactgctggggagctgctgcatgggggaggggggggctttggaaggctccactgggcagagaagcaaaggtaagtcccgaagggctatgaagccagaggccagatggcacgtttttccagaagcagcagatggccagctgggtggggcttgggggctagagcggccctgggtacacgcctttgtagcacagtgcactgctttgaaccctttatgtttaggcagcccagtgcactgcagtgggcagtgtactgagctgccccaaaaacacacaacagaagtcctacatgtcactgaaattttccctgtctacatagggatgtggaaatacacacacacacacacacacacactcacacacatacacacacatgcattcacacactcacagagtctattctgagttaaaaaataaggaaaaatatgtcagtggtaaggcttttgtgaatgtgcaaggccttagatttgattccccagcaccacaaaaataaataaatacaaaacagagctgggcagtagtggtgcacacttgagaggcagaggcaggtggatgcctatagtttaaagccagtctgatctacatagagaggtcctgtctcaaataaataaaaaacgaacaaataagaaccaagaacaaaataaaatacattaaatgtgtatatcggtttatcagctcacagtgtctgacttcctctcttccttcctatgctgaatttcctcctgctaaaagataagtgaaaattttttaaaaggtctcttagaggacagttttatttggggggagttgattggtttgttgggtacagataaaactagcccttgctggctttgaactccatatagactgcaagttatttatttattcattgattttttgagacgaggtctccctaggccatcaggactgggcctgaactcagtcagtctgtaatccggacagggctcctgagtcgctgagacacagacctagtcaccaggtgtcctcctcttccttctatgtgggttaattttgaaataatacttattgcctttattaatcccagccgtgggaggcagaagccggtggatctttgagttcgaggccagcctggtttacaaagcaggctccaatacagccaggactacatagagaaattctgtcttggaggaaaataaaaaaaaaagctgggcagtcttggctcgtgcccttaatcccagcactagggagtttagggccagcctggtctacagaattagtttcaggatagccagagatgcatgggaaaaccctgtctcagtaaaacaaaattatatttgtttatttatccattcatttattctcgtgtgtgtgtgtgtgtgtgtgtgtgtgtgtgtgtgtggtggtgtgttggggaagatgccatggtacgcgtgtggaagtaagaggacaatttgcattctaccacatgaagcccagggattaaactcagtacatcaagagtttttctcaagcggggggtggtggcgcacgcctttaatcccagcactcgggaggcagaggcaggcagatttttgagttcaaggccagcctggtctacaaagtgagttccaggacagccagggctatacagagannnnnnnnnnnnnnnnnnnntttctctacctgtggagctatctcaatcacctctggcctttagttagttagttagttagttagtcagtcaattagttaattttagagttttggggtagcattggctgtcctggaactagctctgtagaccaggctggccttgaactcacagagatccacctgcctctgcctccagagtgctgggatgagaggccatgtgccacccctctcggccttttttaattctttataaagtatgcccaagagttgcataagtctcttgcaaatgggagctataacccctccagcagacatctgagaactcttgcttgtttgttgatcactcccgggcttataaggtcaaatttcatgccccctagatagaatatttccacataacctgtttagaaaatttgtctttttagaaagatgtttaatttgctatcttgtgaagtttaataatgcttcatacaatattcacttgttctaagttttttcttccaaatccaggacatgcttatattaaaaaatgattctttatgtgatgtttaaataaatgggacttctatctcttatctagtacagttactttttaagacagagtttcacagaaccaaagatgactttgactcgacccccctgccttcaccttccaggtgctgtgcttgagctacgttccctacaggagtataaaaaaaggttgtgttcgagacagggatttcctatgtagcccaggctggcctacaaactcacagagatctgtgtatgtcagcctgctgagtgctgggattaaaagcatgcaccaccactccataaaatatttatcttttagagtttatcttcccaatacttgaggtgaaaccaaagtattggctcccatccccaaacagttactaagcctttagtatcttaccaaagctggaagaacacagaaatcaaaatgagatataagccaggtttggtggcgcatacctgtctggaatcccagctgctttgaaacctgaagtaagagggtctacctgtgagaccatgtttcaaaaagcaaaagggaatctggccagcaagatggctttgagagtagaagtgagcagtaggaggcctgaaggcccgagtccaaatcccagaacccctggtagacctccacacacactctgtggcacactcatgcctgcaatacgcatcacatgtgagcacatatgtgtacacacacactaacaacaacaacaacaacaataacaataatagagaaaaacaatatccctacatcttcagttccacttcgaggttttgatctcttggctggtggcccctaggaattcccctgggtttcaaagggaagtttcaggatttatctttttagaaagcaaaagaccaaaacatcttgcaagttacttctgcttgtttggaaacaaaaagacttagcttgaggaaaaaaggtaaatgcttggcagcaaactataaatggatatttttggggttggtgagatggctcagcagttaagagctcttccgaaggtcctgagttcaaatcccagcaactacatgatggctcacaaaccatccataatgagatctgacgccctcttctagtgtgtctaaagacagctacaatgtacttacatatataattataaataaatctttaggctggagcaagtggggtagagtgagcagaggccctgagttcaattcccagcaaccacataatggcttacaaccatttgtacagttacagtgtaatcatataaataaaataaattagtctttaaaaaatttttttgtgtgtgctggtgtagtgttggcacatgcctttaatcccagcacgtgggaggcagaggcaggcggatttctgagtttgaggcctgcctggtctacagagtgaattccaggacagccagggctacagagagaaaccttgtctcgaaaaaccaaaaaaaattttaaaaattaaaaaataaatggatattttcggcacctgggtaaatgcttgattggtgtcagctctcagttgacgtcatcacctgttaacattcaaggattcttttctccttgcccacagcccagtcttctgggacagctccagtagaagaagccaaagcccatccatggagggatgccgggagacagaagtgaccaacggctccaacggtggcttggagttcaaccccatgaaggagtacatgatcctgagcagtggccagcagatcgccgtggcggtgctgtgcaccctgatggggctgctgagcgccctggagaacatggccgtgctctatattatcctgtcctcccggcggctccgcagaaagccctcgtacctgttcatcagcagcttggctggagctgacttcctggccagcgtgatcttcgcctgcaactttgtcatcttccacgtcttccacggggtcgactccaacgctatcttcctgctgaagatcggcagtgtgaccatgaccttcacagcctctgtgggcagcctgctgctaaccgctgttgaccgctacctatgtctgtgttacccgcctacctacaaagctctagtcacccgtgggagggcactggtggccctctgtgtcatgtgggtcctctcagcattgatttcttacctgccgctcatggggtggacttgttgccctagtccctgctctgagcttttcccactgatccctaacgactacctactgggctggcttctattcattgccatcctcttttccggcatcatctatacctatgggtatgtcctctggaaagcccaccggcatgtagccaccttggctgagcaccaggacaggcaggtgcctgggatagctcggatgcggctagacgtgaggttggccaagactctgggcctggtgctggctgtgctgctcatatgctggttccctgcactggctctcatgggccacagcctggtcaccacgctgagtgaccaggtcaaggaggccttcgccttctgttccatgctgtgccttgttaactctatggtcaatcctatcatttacgccctgcggagtggagagattcgctctgctgcccagcactgcctgataggctggaagaagtatctacagggcctcggacctgaggggaaagaagaaggcccaaggtcctcggttacagaaacagaggctgatgtgaaaaccacctaggagccaggatccagaactccaggctgctccaactgctgacaccacctgtctttctactggaaacagcccgagtcagaagtccgttcagttcactccctcgaagagagaggggttccagacccggattctttctgaagccagttctagggtaatggaaacagatccccctttttgctaaggaatgctggttggctggaaggtggcctggtcatgcctaccttttccagtctgtggagaggggcctgtaagaatggcaggctctgttcatatcaaatcaggaaagccttctgactccaaagacctagaggccagaggggcctccagagatgatactaaaggattcaggagatctgtgaagacaagggacctgttctcctggaatctagagtaccccagccgtggggccactgccctcaacttcatagatgtccatgtcttccatagtgtggattctagactgtcctgctgaagatagagagaccagctgcttctggttcctgcttcatcctctgtggctgtagagctatgtgaggctccgccttcaggccacccttgcctcttgagggtcaagaattatgatgccctaaggaccaaggatgttcgcttacatccttcagacagcgtcaggagctgtcagctcagggtatcctgttgttgggaaagggccctcctgacatcctgataagccttgaaagccattatgaccttaggtccttaggggcgcagaggaagctgggttcactggaggtacaaagtcttcagagaactctattccttgtgacattttgctgtgtctcacacagcactatcccagtcttgcctagcttcagtacaaagcaagatattcacacagattctttgggtcctaggctgttcccagtgatgcttgactcagccccactggcctcttccacactctggtcctgaaggataagcagaaggagttgggagggaagacttcctgctgcaaaccaggcatcctaggtccacagccccacgctgtgtctctgggtgcctgcctttgcccttcagtaaaggttgcagtcccaacagatggaggttcaaggcgctgctggtggtaggaggggtaggtggcactggggaccacagacacagtgaaaggaaaactcttaaacatttaatacttttgcttttagaagatccagcccgcagacaggacttccccattgcccaaaggaactaacagggtggtgtccagtgcaaagaaaaatcagcctccctaataaagcaaggcggtccactcggctctacagcctctcctaagcttctgcaaggtgacagtttgttttctctgtgaaggtcaacggcgtctcattttattcttcccaagacaagttctgtgcatcaaaagctgctgcaaattctaatcgctgtttgggaggatcaggggaagaagtcgattcgcccacgcttagtgatttagactgtatttcaacatcaacttgggggaggaagagacagaaaagacacggtgtttccttattactcctcaaaggaggaagtgcttggttctgtcaacataagccgatctctccaaggtgcctgacagaggaggagggaatacagtttccacagctgtgaattcctgcaccagctttggtccacacttatgtggtcttgggcaacccccgccctttaccttgctttggtttccttctcggtaaattgggaatggtggggaaaacaatgctctccagggccattaaaacctctcattgctctaacatgctgtggttatctctgcaaccatggagacctttgtgccatatggaccatgtgacttctggctcccatacttcctgaagttatgggcacacaccatataccattgggcgtgtgctgactgtagaggaattgggtgactggccaaatgagttttagagattttcccagggcaagagggttctcttggctctcaatttttctggtccctcatgcctcagtggtcccctgtgtgtgggtcaggcatgcttgtttagcggtgccagactgaagctccggccttccggtgtaccaagcaagtgttgtactcctgagtcaggttttcttcagttagatgctaactaagctctctgagagaccctcaaagtttttgaggtgtagctcagtcagtagagtgctgcatctgcaagagcaaatctctgggttcaaaggtcagtactacctaaaaccaggaatggcagtgccatcccctacctgtaatcccagcactcctgaggtacaagcaggaagatcaggaatgcaaagttactgtagctgtaagttcgaagccagcctgagctagttgagacccccttacctcaaaataaatttaagttacaattctaaattaaattaaaatgtctagggctggagagatggcttagtggttaagagcacagactgcttttccagaggtcctgagctcaattcccagcaaccacatggtggctcacaaccatctgtaatggaatctgatgccctcttctggtatgtttgaagagagcgatggtgtactcatatacataaaataagtaaataaatctttttttaaaaaaatgtttaagttcctcggagttcttgttaagttcaacggacaaaagatagactaaaataaccacgtctgcccttaatctttcagcagccatttctctccctccgcataaagctccttctaaccttgttatttctcaatctcttcggcaactctccaatctgctaaactccacctgctggctggaggtatagcacagagaacccgcggctcctaaatagtcactaaataaaacgacctggcttcagccttcccctgaagattggtgcaacaacgtggacttctcccagttttccccacaccttgggtctttctcacttgcggggaatccggcaattaaatccttaggcgagtctacggaatttaaattcaatagagcagaaccagcaacgccgccttaagtctttctcccttccaatgccagagggcgctccagagccgcaagcctgaccccaccccctctccttccaagccaatcgttactctgagaggcggggctactcgccggcgcttgcgtgttaagaggggggcggtgcgggcccggaagcaaggatgtaggagctgaacttgagtggtgggctgtggactctgggatgctgctgctgctgctgctgctgctagtggctgcggcccaggcagtggccctggctccgcgccgcttcactccggactggcagagcttggactcgcggccactgccgagctggttcgatgaggccaagttcggggtgttcgtgcactggggggtgttctcggtgcccgcctggggcagtgaatggttctggtggcactggcagggcgatcggatgccggcctaccagcgcttcatgacagaaaactacccgcccggcttcagctacgccgacttcgcaccgcagttcacagcgcgcttcttccacccggatcagtgggccgaactctttcaggctgccggggccaagtgagtgcgggacgggcgcgaggcgggagcaggcaggccatagccggcgctgcctgacctcggaaggtccaggaccctacgttctgcatctcggaggaaggacgctaaagacgagaatccagctgaggatcagttaaaaataaataaataaaataaaataaaataaaataaaattaaggcgggaaagcactgggtggtacacctgtgcggagagagactagaatcaggctacatcggtgtctcgtttgaaaggtccagaacacagcccagattcccgtcggtggccctgagttgtagacctgaccagtccccttaggctacgggtagcgtccgtccgtggaagcttataaaaaagcgccgcctgacttccttgtagccctgtgcctctaaaggaagaaggaaggatggaagtttggggttgctctttgttggggtctccctcacttctcgcttgcttataatagaactcagaggaggaagggggttgtttgggcaaagccctgcagaggaagtgcgttttgagagccctctaagccagagaaaatattggctgactttggacgcgggatttggccactgtgagggcagactcccgctcctggcttagtgtagtcctccgctctcttcattgattttctgccaaactccgactttttattccctcgggacgttaggttttctcccccgaagggaaaggctgtgtatagctggcgcttagtatattcgccaagtaaaaggcctgagggaacagaaatctgtcttcttgccatcttgagagccgtaatttacaaagttgaactccagcctttttccagacttcctgtttaatggacgaggtaactagcccagagagaggaaggagaggaaggagcctggtgtcctagactgcaggtctatgatctggaagtgaaagctccagaaagctcatgggacaggtgtgcccagactctgcaagccatacccagagggcgtggttatttgcttgttgagtgggaagggattttatatttcagaaggactttttgaaaggggaaagagatgtattgcaggaaggactgatgtatgagcggaagtctgccctgagggggcccttacaccagctagtggtaaaatctcatgtaacatgctatcttttcctataaaagtaagtgatatattgaatggactgattatctcaacacattttttttttcagtcctagatatttgagcctttgtcaccttaaatgacaggcagtttcacaatcttggttaagaaaacgagcagatgggggctggagaaatggctcagcggttaagagcactgactgttcttccaaaggtcctgagttcaattcccagcaaccacatggtggctcacaacaaccatctgtaatgggatttgatgccctctttctggtgtgtctgaagacagctatgatgtactcatacatataagtaatataaataaacaaatattaaaaaaaaaaaacgagcaggtgcttgtgtctgccttttgctcttgccaatagattggggcacagggttgacacaggttcatcacttatttccagaagggttgagcctgagagctaagtagcacagcatttcttctgccagcctcccctctgcctctaaacctccagtgcctccatccattcttgagtcatacctgcacagggataattatcactatagaaacattatcacggttgtcatggtgactcatcccaagggcctatccttttcatcaagacctgcccgacttgttaaaattctcagacatgcctggcaaggccatggttgtggacatcgcccaactcctttgttctcgtttggttttgatgcctgcaggtacgtcgtcctgaccacaaagcatcatgaaggcttcacaaactggccaagccctgtgtcttggaactggaactcgaaggacgtggggccccaccgtgatttggtcggtgagttgggagcagctgtgcggaagaggtgggtgtctgtggacagccagcgactccaccaacctccctatctagccctccagagagccagtctgggtccccttgtttgtctgctagggtcatttagccagagagcagatggactcccagactttgaatttgagacttggtggttttcacaggaccaaaggtgatccaaagaaagttcacagtgggtggaggacacctgtcatagaccatggtggtcaactttgcaacctgcaaaggacttccatgagagaacttgcaatacagagccttctctaatatgtgacagaagccagggactgggtcccacctttctcctccatagccaccagcatccaacaccaagctgttcagacctgagggcaagctctgatgatggccgatcaaaaaccaaagagggcaacacacagctgattctcctcagcacccctcagtcttgtcacttaacgggaagtaacaagccagactgctgctaattacttgggaggcaaagtaacccaagccagacagagtagccagacatgatggcacttgggtggcaatggcaggagggtcaggagttcaagaatgaccttaggtatgtagtgagtttgagtctagcctgggctaaacaagactacatctcaaaaagccaaatactactactaataatagaaattaacttctccattaagaggtggggtggctttgggttttggtgctaagggtcaaacacgggacctcacgtatattaggcggctgctcctacaccgaatgcattaggcacttctgtgttagtgaccaccatacctgttaaaaccagcttcaggcagggaaggttgcttttcagaccagcgtggtggagcatctgcatacatggcatgcacacgctgtggtcgaggccattcattcacgtatcaaatgactcgggagcagcaggaactagaggatgtccttcaggtgtcccacttctgccagcatgtccccccctcggaacggttccatggacccccaaaacaacactatcaggaaaggaacaagccttcagaacaggagcctggggggagatagtgcagattcaagcctcagcaccaagccctatcccctgccaccagttcgtatccgggttttaaactctcctagatatgtttgcctttaagaaagaagattgcactgggcatggtggcgcatgcctctaatcccagcacttgggaggcagaggcaggcggattttctgagttcgatcgaggccagcctggtctacagagtgagttccaggacagccagggctatacagagaaaccctgtctcgaaaaaccaaaaaaaaaaaaaaaaagaaggaagattgctttctgctatgactctgagatgtagactgactgcctgtttctataaattgagtttgattgaaacacagctatgcttgtgttctacactgcccaggactttaaaaatgcatttgctgactcctgttacctgctctggtccgtgccccatgctgcacttggccactaaccctgtgataagtgttcatgtgatcttaagtgtggactacacttggactttggaagtagctgttttctttcagtttagtttggtcttatgagacagaaccttgctctagatccctgaagagcttgaaacttgctgtgcagaccaatctaccttctaacttgatgcaatcctcctgcctctgccttccaggtgcttggcttccgggcctggcaccatgcccagccttagcaggctgcattggtaccttctctatcagtggttagtccacaagttacatactgaaaccaaacacacaaacacacacacacacacacacacacacacttcagttctttcttgctgtgttatttttctttattgcccgcactctaatgtttgcatagcaccatatcttaaccataagaattaaacatttttatgaggcacagtgtgacatttgtacagtgtatgatgaacaaatcaggacagttagcacttctagatccttaatgtgtcttttctttgggttagaggccttcagtctcctttctcctggttctttaaagaagtatttaatacagatggggatgtagcacagatgactcccaggaccataaaaaaataaagtaagaagatggtagtggtacatgcctttaatcccagcactcggaagacagagccgtgtggatgtttggggtcagcgtggtctgcatagctagtcccaggctggccagggctacatattgagaccctgtctcaaaaatgtgtgtgtgaaataaattattaaaattaaataaaagatctcagatagcttaggctggcatcaagcccatttggtagccaaggatggcctttaactcctgacccctccctctccccctccaaagtgctgactccagccccagcctgatttttcttaaagcaaatggttggccctctgcctaatgccagctgctgctgtgtttttctgttcaaggaacatacgctacggcctctaccactcgctcttggaatggttccatccactctacctacttgataagaaaaatggcttcaaaactcagcatttcgtcagggcaaaaacaatgccagagctgtatgaccttgttaacaggtaagaaacaggggcacctggggccccaccactgtagagtgctgttccagggctccggcacaaggcagctctttgaaaaccaagtacaagacatcaaaatgataaaagtggtgtttatatcaatgcaaagcttgcttccctccttcccttcccaccgctcagatcttctgggctgtgctcacttactgatgccacagtcacggagacctggctggtgaagtgtcaaagctagtgcttcagggcctcttcccttgccattgggcccagtcaagacctcggcgaggtcaccatttgaaaatcgactgcttgcaatgcggagttgttgctaacggtagctttcgctcccccacctaagctctgggaacagactgcactaccgctcctcacccagagtcccttgaataaaaatcacagacacacatgtcgctcaatttcaacttgcctttttggctcaattgctgggcactacttatctcccgcctggagaagcgtgcccttatcaatactcttaactcggcacctctccatctgccctcaacttagttgctcagttacatcttgtcgctggtcaactgcctgcctgtgagagtggcccacaggcctgagatcccacatggctggtcaccttttctcccactgaagcatggtgaacactctctctctatctctctctatctctctctctctctcaccctccctccctccttccctcccttcctctctctctcttcccctccctctctctcctggtgtctgtctcattcttccaggacctgcctgttccttccgtccagcaattggcccttggcttctttactgatagaccaataaccaattggggaacaagaccttagcataaaaaccacccctccagctaacctgcccaatgttttcttttatatcgattgactgattggttggaggatgagtggcgttggcgtgccacaactcacgtgttcaagtcagaggacaattttgggaagttagttttctcatctactgtgtggaccccaaggatcagcaagccctttcacccactgcccctcttgctaatccgttcaatgctttccctagttatatgtgggagccacccctgcatgggggacccttggagcccaaggggggcttcttcgcccctgtagcccgcggccacgagaacagggttcctgaaggggaggcagggcctgaatggagagatggcaagagaccaagacaaagatactgatcaaggcccaaagtttacttaagagtcttgagtttataaaggggggaaggcccatcccccaccacgccaggttcttgatgctttgtcaccaagttgttgcttattcaggaatgtctcaggtaagaacagttacatgctgtctcaaaaacaaacaacaagctgggctgtggtggtgcacgcctttaatcccagcacttgggaggcagaggcaggtgaatttctgagttcgaggccagcctggtctacaaagtatgtcccaggacagccagggctacacagagaaaccctgtcttgaaaaaccgaaaaaacaaaaacaaaaaccttctgctgggtgtggtgatgcagacatagaatcccagctactaaggaggctgaggcaggaggacagcttgtccccaggaggtgggggacagcctacgcagcatggtgaaaccatgacctacacataggaaaggtactcattaggagccgacgccacagaacttggtattgaaannnnnnnnnnnnnnnnnnnnagcagtgtcttggagataagctcaaaggtggcagaacaattggcctatctaggtcagaagactccaccctgagtggtctccttaacagtggcagaacaggtctgagccagcctgctcaaggctgggggaggctacgcgccctaactctcactttatatattttatttttgttattatgtttgaatttctctctttctttggtttttcaagataaggtttctctgtgtatctctgactatcttgaaaatcactatgtagcccaaactggcttcaaactcagagctccacctgcctttttggtttttcgagacagggtttctctgtgtggccctggctgtcctggaactcactttgtagaccaggctggcctggaactcagaaatccgcctgcctctgcctcccgagtgctgggattaaaggcgtgtgcttttctttttatggtaagatctcactttgtagtccttgttggtgctcccgcttcagcctctgaaatgtgaggatttcaggctgagcctccattctcagctggctggctggctggttggttagtttgtttttgagacaggtcttcctttgtaacctaggatggcctctaatttcaggcatcccctgagtgatgggattacagccatgagccactgtcccaaacttctagccagtccccttgcatctggttttagtcagatgactgtcaggacagttgtaaaacacctgtagagggcaggacaagtgcaggtgtctggagttctgaaatcaagtttagtttttgggttgttgttgtttttcttctttcctctctcctccctctatagtcttatctaaccttggccgacctcacatctatagcaatcctgatggcttgggattttctgcgtgctggaattataggcctgtgccagtgcccctagcttttttcttttgtaaagtttgtggcttagagtaacttgcttagtctctcccttgctttcttctttttttaataatatttatttacttattaattatatatgtaagtagctgtcttcagacacaccagaagagggcgtcagatcccattacagatggttgtgagccaccatgtggttgctgggatttgaactcaggacctttggaagagcagtctttaagtgctcttacccactgagccatcttgccagcccccttgctttcttctttatccctgaactggggttagaaatcacaggagctgacaaggtgatgggcatagagccccagggtggcctctgatttgcaataactcaggttcaggttcccaaatgctaccacacctagctctttttttttattttcttggtccctgacaagacatgggtctttcaacttgctgagcagtgctctgccactgagccacagtcacgtttgattacgatgtgtccgtgagcacgtatgccttatgagcacgcatgtggaggaggtcagaggtcagcctgcggaagttggttctctccttccaggaggattctgggggtcaggcttggtcatcaggcttggcagcagaagctttgccagctcaaggcaagcctcctggcctgcccaagcaccaacctctttgtcaaagcttaattattatttatgtgttgttcgtgtacaccatgggcagcaggtgcctgaggaaaccaaagagcatcaaattccctgaaataagcagttgggagccgccatgacgttgggaagcaaacccaattctctgcgagcagtaagcaggctcgctcaccccctgaggtgactggagccctgggagcagcccccctaattagttactgattatatgtagttccttttctaaaggggcagcgaaggagattaggggaaatgtgccttagtaccgcagtttattattattattactattgctattattactatgattattaccctttagtttatttgggacgtgtgtgcatgcatgtgccatggtgtgcatgcagaggtcagaagaccacttgcagagtcagtgtgcccgggactgaactcaggttgtgagacttggcaagcaggcgcctttacacactgagccagttcaccagcccctgcagctctccttttaattaaattaaattgttactttttggttttggtttttggtttttggttttggtttgttttggtttgtttttctcgagacagggtatcactatgtagccctggctgtcctggaactcactctgtagaccaggctggcctcgaactcagaaattcccctgcctctgcttcccgagtgctgggattaaaggcgtgcgccaccacacccggccctaaaatcgttactttagctgtttgagtgttttgcctgcatgtttgtctatgctctccatgtacgcctggtgccaacagaggccagaaagtggcatcagatccccaggggaactgaaggatgggtgattgtgaacctccattgtgggtgtgggaaatcagacgagagtctcaacttctagacgagcagcccgttctcttccagagcctgagccatccactgctgaccccgcactacagagctacctctccacaccctgtctctgaggctcttttagactgtggttgtgttagcaaaaaaaaaaaaaaaaaaaaagatttcttatctctttagtttctgcattgtgatttttatggtcctttccaatcaagagacttccttctgacaagctaggagtggaactcatgacctcacatgtgataggcaagtgctctccctcagagccagactcccagttctaatttgtaaatatttattgtaatacctgtccgtaa

SEQ ID NO: 929 - DNA, 3715 bp, Mus musculus
agatctggatacagaatagccaggacaaggctccacaagaccctggggcccagcggctgacaaatgacacccagtcttctgggacagctccagtagaagaagccaaagcccatccatggagggatgccgggagacagaagtgaccaacggctccaacggtggcttggagttcaaccccatgaaggagtacatgatcctgagcagtggccagcagatcgccgtggcggtgctgtgcaccctgatggggctgctgagcgccctggagaacatggccgtgctctatattatcctgtcctcccggcggctccgcagaaagccctcgtacctgttcatcagcagcttggctggagctgacttcctggccagcgtgatcttcgcctgcaactttgtcatcttccacgtcttccacggggtcgactccaacgctatcttcctgctgaagatcggcagtgtgaccatgaccttcacagcctctgtgggcagcctgctgctaaccgctgttgaccgctacctatgtctgtgttacccgcctacctacaaagctctagtcacccgtgggagggcactggtggccctctgtgtcatgtgggtcctctcagcattgatttcttacctgccgctcatggggtggacttgttgccctagtccctgctctgagcttttcccactgatccctaacgactacctactgggctggcttctattcattgccatcctcttttccggcatcatctatacctatgggtatgtcctctggaaagcccaccggcatgtagccaccttggctgagcaccaggacaggcaggtgcctgggatagctcggatgcggctagacgtgaggttggccaagactctgggcctggtgctggctgtgctgctcatatgctggttccctgcactggctctcatgggccacagcctggtcaccacgctgagtgaccaggtcaaggaggccttcgccttctgttccatgctgtgccttgttaactctatggtcaatcctatcatttacgccctgcggagtggagagattcgctctgctgcccagcactgcctgataggctggaagaagtatctacagggcctcggacctgaggggaaagaagaaggcccaaggtcctcggttacagaaacagaggctgatgtgaaaaccacctaggagccaggatccagaactccaggctgctccaactgctgacaccacctgtctttctactggaaacagcccgagtcagaagtccgttcagttcactccctcgaagagagaggggttccagacccggattctttctgaagccagttctagggtaatggaaacagatccccctttttgctaaggaatgctggttggctggaaggtggcctggtcatgcctaccttttccagtctgtggagaggggcctgtaagaatggcaggctctgttcatatcaaatcaggaaagccttctgactccaaagacctagaggccagaggggcctccagagatgatactaaaggattcaggagatctgtgaagacaagggacctgttctcctggaatctagagtaccccagccgtggggccactgccctcaacttcatagatgtccatgtcttccatagtgtggattctagactgtcctgctgaagatagagagaccagctgcttctggttcctgcttcatcctctgtggctgtagagctatgtgaggctccgccttcaggccacccttgcctcttgagggtcaagaattatgatgccctaaggaccaaggatgttcgcttacatccttcagacagcgtcaggagctgtcagctcagggtatcctgttgttgggaaagggccctcctgacatcctgataagccttgaaagccattatgaccttaggtccttaggggcgcagaggaagctgggttcactggaggtacaaagtcttcagagaactctattccttgtgacattttgctgtgtctcacacagcactatcccagtcttgcctagcttcagtacaaagcaagatattcacacagattctttgggtcctaggctgttcccagtgatgcttgactcagccccactggcctcttccacactctggtcctgaaggataagcagaaggagttgggagggaagacttcctgctgcaaaccaggcatcctaggtccacagccccacgctgtgtctctgggtgcctgcctttgcccttcagtaaaggttgcagtcccaacagatggaggttcaaggcgctgctggtggtaggaggggtaggtggcactggggaccacagacacagtgaaaggaaaactcttaaacatttaatacttttgcttttagaagatccagcccgcagacaggacttccccattgcccaaaggaactaacagggtggtgtccagtgcaaagaaaaatcagcctccctaataaagcaaggcggtccactcggctctacagcctctcctaagcttctgcaaggtgacagtttgttttctctgtgaaggtcaacggcgtctcattttattcttcccaagacaagttctgtgcatcaaaagctgctgcaaattctaatcgctgtttgggaggatcaggggaagaagtcgattcgcccacgcttagtgatttagactgtatttcaacatcaacttgggggaggaagagacagaaaagacacggtgtttccttattactcctcaaaggaggaagtgcttggttctgtcaacataagccgatctctccaaggtgcctgacagaggaggagggaatacagtttccacagctgtgaattcctgcaccagctttggtccacacttatgtggtcttgggcaacccccgccctttaccttgctttggtttccttctcggtaaattgggaatggtggggaaaacaatgctctccagggccattaaaacctctcattgctctaacatgctgtggttatctctgcaaccatggagacctttgtgccatatggaccatgtgacttctggctcccatacttcctgaagttatgggcacacaccatataccattgggcgtgtgctgactgtagaggaattgggtgactggccaaatgagttttagagattttcccagggcaagagggttctcttggctctcaatttttctggtccctcatgcctcagtggtcccctgtgtgtgggtcaggcatgcttgtttagcggtgccagactgaagctccggccttccggtgtaccaagcaagtgttgtactcctgagtcaggttttcttcagttagatgctaactaagctctctgagagaccctcaaagtttttgaggtgtagctcagtcagtagagtgctgcatctgcaagagcaaatctctgggttcaaaggtcagtactacctaaaaccaggaatggcagtgccatcccctacctgtaatcccagcactcctgaggtacaagcaggaagatcaggaatgcaaagttactgtagctgtaagttcgaagccagcctgagctagttgagacccccttacctcaaaataaatttaagttacaattctaaattaaattaaaatgtctagggctggagagatggcttagtggttaagagcacagactgcttttccagaggtcctgagctcaattcccagcaaccacatggtggctcacaaccatctgtaatggaatctgatgccctcttctggtatgtttgaagagagcgatggtgtactcatatacataaaataagtaaataaatctttttttaaaa

SEQ ID NO: 930 - protein, 359 aa, Mus musculus
HPVFWDSSSRRSQSPSMEGCRETEVTNGSNGGLEFNPMKEYMILSSGQQIAVAVLCTLMGLLSALENMAVLYIILSSRRLRRKPSYLFISSLAGADFLASVIFACNFVIFHVFHGVDSNAIFLLKIGSVTMTFTASVGSLLLTAVDRYLCLCYPPTYKALVTRGRALVCVMWVLSALISYLPLMGWTCCPSPCSELFPLIPNDYLLGWLLFIAILFSGIIYTYGYVLWKAHRHVATLAEHQDRQVPGIARMRLDVRLAKTLGLVLAVLLICWFPALMGHSLVTTLSDQVKEAFAFCSMLCLVNSMVNPIIYALRSGEIRSAAQHCLIGWKKYLQGLGPEGKEEGPRSSVTETEADVKTT

SEQ ID NO: 931 - DNA, 21906 bp, Homo sapiens
  misc_feature (1)...(21906): n = A,T,C or G
nnnnnnnnnnnnnnnnnnnnnnnnnnnnnnnnnnnnnnnnnnnnnnnnnnnnnnnnnnnnnnnnnnnnnnnnnnnnnnnnnnnnnnnnnnnnnnnnnnnnnnnnnnnnnnnnnnnnnnnnnnnnnnnnnnnnnnnnnnnnnnnnnnnnnnnnnnnnnnnnnnnnnnnnnnnnnnnnnnnnnnnnnnnnnnnnnnnnnnnnnnnnnnnnnnnnnnnnnnnnnnnnnnnnnnnnnnnnnnnnnnnnnnnnnnnnnnnnnnnnnnnnnnnnnnnnnnnnnnnnnnnnnnnnnnnnnnnnnnnnnnnnnnnnnnnnnnnnnnnnnnnnnnnnnnnnnnnnnnnnnnnnnnnnnnnnnnnnnnnnnnnnnnnnnnnnnnnnnnnnnnnnnnnnnnnnnnnnnnnnnnnnnnnnnnnnnnnnnnnnnnnnnnnnnnnnnnnnnnnnnnnnnnnnnnnnnnnnnnnnnnnnnnnnnnnnnnnnnnnnnnnnnnnnnnnnnnnnnnnnnnnnnnnnnnnnnnnnnnnnnnnnnnnnnnnnnnnnnnnnnnnnnnnnnnnnnnnnnnnnnnnnnnnnnnnnnnnnnnnnnnnnnnnnnnnnnnnnnnnnnnnnnnnnnnnnnnnnnnnnnnnnnnnnnnnnnnnnnnnnnnnnnnnnnnnnnnnnnnnnnnnnnnnnnnnnnnnnnnnnnnnnnnnnnnnnnnnnnnnnnnnnnnnnnnnnnnnnnnnnnnnnnnnnnnnnnnnnnnnnnnnnnnnnnnnnnnnnnnnnnnnnnnnnnnnnnnnnnnnnnnnnnnnnnnnnnnnnnnnnnnnnnnnnnnnnnnnnnnnnnnnnnnnnnnnnnnnnnnnnnnnnnnnnnnnnnnnnnnnnnnnnnnnnnnnnnnnnnnnnnnnnnnnnnnnnnnnnnnnnnnnnnnnnnnnnnnnnnnnnnnnnnnnnnnnnnnnnnnnnnnnnnnnnnnnnnnnnnnnnnnnnnnnnnnnnnnnnnnnnnnnnnnnnnnnnnnnnnnnnnnnnnnnnnnnnnnnnnnnnnnnnnnnnnnnnnnnnnnnnnnnnnnnnnnnnnnnnnnnnnnnnnnnnnnnnnnnnnnnnnnnnnnnnnnnnnnnnnnnnnnnnnnnnnnnnnnnnnnnnnnnnnnnnnnnnnnnnnnnnnnnnnnnnnnnnnnnnnnnnnnnnnnnnnnnnnnnnnnnnnnnnnnnnnnnnnnnnnnnnnnnnnnnnnnnnnnnnnnnnnnnnnnnnnnnnnnnnnnnnnnnnnnnnnnnnnnnnnnnnnnnnnnnnnnnnnnnnnnnnnnnnnnnnnnnnnnnnnnnnnnnnnnnnnnnnnnnnnnnnnnnnnnnnnnnnnnnnnnnnnnnnnnnnnnnnnnnnnnnnnnnnnnnnnnnnnnnnnnnnnnnnnnnnnnnnnnnnnnnnnnnnnnnnnnnnnnnnnnnnnnnnnnnnnnnnnnnnnnnnnnnnnnnnnnnnnnnnnnnnnnnnnnnnnnnnnnnnnnnnnnnnnnnnnnnnnnnnnnnnnnnnnnnnnnnnnnnnnnnnagtgagactctgtctcaaaaaaaacaaaaacataaccaaaaaaagacataaagatgtctatagagaggcacaggatttttccttttgcctcaggcaaggctcggttttcaactccagtctggggaaaatccctccagtattctctaaaatgttatattgctgcctgcaagttctcttcacttttatctactcataaatcctctaaactctccttaaggttaggctttacaagggattggcccaacactgtggggggtttttttgtttttgtttttttgttgtttgtttgttttttggagatggagtcttgctctgtcacccagactggagtgcagtggtgcaatctcagctcactgcaacctccgcctcccgggttcaagcgattctcctgcctcagcctcccgagtaggtgggactacaggcgcacaccaccatgcctggctaattttttgtattttagtagagacagggtttcactgtgttgccaaggctggtcttgagctcctgagctcaggcaattcgcctgtttcggcctcccaaagtactaggattacaagcatgagctaccacgcccggcctaacactgtttttaagattcatcattgttggcacgttttcaccactttgtggtattccttcatatggctgtattacaacttatttatccattttccagttgatggacatttagaattgttcttctatttcaaaaatgccaaagagaacattcttgtacatgcctccctggacgcacctgcaggagttcctccagaacgtattcccgggactgcaattgatgtatcgtcaacttcaccagattttgccaagctgctcttcaaagtgtctgtgtcaacttacacccccatcgcaatgagagttcttttggctccacgccttctccagcactcagtattgtcagccttacttttttaccgatctgatgggagtgaaacacatttctctgtctactattgaggttaagcatcttttcaaaggattattgaccatttctctctcatgccctgtatttttcttcattgtggttgctctcctttttcctttagtaatcttgcctgtggtcatctattttataatcttttcaaacagccagctttgactttgtcagttctttctcttccctatagttttgccatgtcattaatttctgctcttattatttctgtcttctgctttctttgaatgtatgccatggcccttcttctaatttcatgggttgcatgatgagctcatgaggcttttttatcttgtagtatgagcgtttattattaatttatttattgagaacagagtctcgctctgttgtccaggctggagtgcagtggcacaatcttggttcactgaaacctccgcctcccaggttcaagcgattctcctgcctctgcctcccaagtagctgggattataggcaccagccatcatgctggctaattttttttttttttttttttttgtatttttagtagaggcagggtttcaccatattggctaggctagtctgaaactcctgacctcaggtgatccacccgccttggcctcccaaagtgctgggattacaggcgtaagccaccgcacctgatagtatcagcatttagagctgtaaatttccctttgcatacgactcagatgaatctcacacattttaatgtctcacaatttcatagtcattcaatgccaagtatcttctaatcgcctttatgaatttttgaaccaggaattattcaaaagtgtgtctttttttcttttttcacacatcagactggtaacgtgacaatgtcatcataggtttgaggaacatctcacacttgagcatgaaaaccagtcatcacgcttatgaactacgaagggatcccgaagtgtgtttttaaagatccatacctgaggccaggcacggtagctcatgcctataatcccagcactttggaaggccaaggtgggcagataacctgaggtcaagagttcgagaccagcctggccagtatggtgaaaccccatctctactaaaaatacaaaaaattagctggtcgtggtggcaggcacctgtaatcccagctacttgggaggctgaggcaggagaatcgcttgaacctgggaggtggaggttgcagtgagccaagaccgctgccactgcactcccagcctgggcacaacagtgagactccatctcaaggaaaagatccatacctatgaactttgttagtaatttttttttttaaagacaaaatttcgctctcgttgcccaggctggagtgcaatggcacgatcttggctcaccgcaacctccgccttcccaagttcaagcgattctcctgcctcagcctcccgactagctggaatcacaggcaggcaccaccatgcccggctaattttttgtatttttagtagagacgaggtttcttcacgttggtcaggctgatctcgaactccctacctcaggtgatccgcccgcctcggcctccaaagggctgggattacaggtgtgagccaccatgcccggcctagcaattttttttttctttttttgagacagggtttcactctgtcgcccaggctggagtgtagtgatgctcattgcagcctccgcctcctaggttcaaacgattctcctgcctcaaccacctcagtagctgggattacaggtgtgcaccaccaggcctggttaatttttgtatttttagtagagatggggtttattagagacaggctggtctcaaactcctggcctcatgtgatctgcccgcctcggcctctcaaagtgttgggattataggcatgagccaccatgcccaaccagtaattttttaaaattattattattatatatattttttgagacggagtctcactctgtcacccaggctggagtgcaatggcgtgattttggnnnnnnnnnnnnnnnnnnnnnnnnnnnnnnnnnnnnnnnnnnnnnnnnnnnnnnnnnnnnnnnnnnnnnnnnnnnnnnnnnnnnnnnnnnnnnnnnnnnnnnnnnnnnnnnnnnnnnnnnnnnnnnnnnnnnnnnnnnnnnnnnnnnnnnnnnnnnnnnnnnnnnnnnnnnnnnnnnnnnnnnnnnnnnnnnnnnnnnnnnnnnnnnnnnnnnnnnnnnnnnnnnnnnnnnnnnnnnnnnnnnnnnnnnnnnnnnnnnnnnnnnnnnnnnnnnnnnnnnnnnnnnnnnnnnnnnnnnnnnnnnnnnnnnnnnnnnnnnnnnnnnnnnnnnnnnnnnnnnnnnnnnnnnnnnnnnnnnnnnnnnnnnnnnnnnnnnnnnnnnnnnnnnnnnnnnnnnnnnnnnnnnnnnnnnnnnnnnnnnnnnnnnnnnnnnnnnnnnnnnnnnnnnnnnnnnnnnnnnnnnnnnnnnnnnnnnnnnnnnnnnnnnnnnnnnnnnnnnnnnnnnnnnnnnnnnnnnnnnnnnnnnnnnnnnnnnnnnnnnnnnnnnnnnnnnnnnnnnnnnnnnnnnnnnagtgaaactccatctcaaaaaaataaaaactaaaaataatacattttatatattagaaggtgatagtggtatggaaaaaataaagacgaggtcagtgtaaagagaagcaaaagagctggaggttgggctaggtgcagtggctcatgcctgtaatcccagcactttgggaggctaaggcgggcagatcacgaggtcagatcaagaccagcctgactaacacggtgaaaccccgtctctactaaaaatatgaaaacttagccgggcatggtagtatgcgcctgtagtcccagctactcgggaggctgaggcaagagaaaggcttcaacctgggaggcagaggttgcagtgagccgagattgtgccactgcactccagcctaggtgacagagtgagactccgtctcaaaaaaaaaaaaaaaaaaagagttggaagttgggatgagttagggtattacatggggtagtcagggtaggtgtcattgaaaaagtaagatctgggcaaagacttaaacaaggtgagagcaagccaagtaaatgttgagggaaaggtgatccaggaaaagggaacagccagtgcaaaggacctgtggctgaagagaagactgattaagaagccaatgtggctaaagctgggtcaccaagggaatcatggtagaagggaccataacactaaggactttggcttttacatagtggactagggagctatgcagggtttgggacagagaaatgacaagatcctatatttttaaaggatcaccctgactgctatgttgaaactagattagaaatgggcctgattaaaagcagggggcccagttaggaagctattgcaataaaccagataagagatgatgcctggttttttttttaagcctaaaattaatcaatgtctttacccacttcctagataaagctttaactctattcatctctttcttgtcttgcatttttgtcattcacaattttatttctactttgtttttgtttttgtttgaaacaaggtctcattctgtcacccacactggagtgtggtggcacaatcatagatcactgcacactggactacctgggctgaagtaatcctttgacctcagcctcccaggtaaatgggaatacaggcatatgtcaccacgcctggctaaatttttatgtcttgtagagatgggtttcaccatgttgcttaggctggtcttgaactcctgggctcaagcaatcctcctgccttggactcccaaagtgccaggatttcaggcatgagccactgtgcccagtctccactttggttttgtttgtttgttttgttttgttttttgaaacagagtctcactctgtcacccaggctggagtgcagtggcatgatctcggctcactgcaacctctgcctcccaggttcaagcaattctcctgcctcagtctcctgagtagctgggactacaggtgcacaccaccacgcctggctaatttttgtgtttttagtaaagatgggcataaattactcactattatcattgttgttttataaagccatttgcttttctttactcatatttgtcaacttacttgctcactattctttcttgccgttcttttcttccctttgggttgaatttccttctaaaatgcacattctttagatgttccttcagtgaaagtctgttagtgaacaattttctttgaattttttagacctcattcttgaatgatagtttagctgggtataaaattctagactgacagttttttctttattttttggcttctattgttgctgatcagaaatctgctcttaaaattaattatggttctcttacaggtaatttggcttttcattcttactgccttatatttttctttgtctttggtattctgatatgtatgctatatgatatacatgaacatggaatgtgtttttaaaaattctacttggggctgggtgtggtggctcacgcctataatcccagcactttgggaggccgaggtgggcatatcacctgaggccaggagttcaagcccagcctggccaacatggaaaaccccttttctactaaaaatacaaaaattagctgggcatggtggtgcacacctgtagtctcagctatgtcaggaggctgaagctggagaatcacttgaacctgggaactctgtctcaaaaaaaaaaaaaattctgctttgggttccctgtgatttccaaatctgaatagtcttatttttcatggatcctgaataattcttttttgttgttgaggcagggtctcattctgttgcccaggctgcagtgcaatggcatgatcatggctcactgaagccttggcctccctgggctcaagtgatcctcccacctcagcctcccaagtagctgagacaataggcatgcaccaccatccagctaatttttgtatttttttgtagagatggggttttcccatgttgcccaggctggatggataattctttactactacctctttgactattgcccaccaccagttttctctgtttatcctctctaacactcctctgagatataaacatttttactcaatccttcataactcttaacttctctttcttgttttccatcactttatctctttgttctgcattgtgagaaatttcttcagagctacattcttttttttttttttgagatggagtttcactcttatcgcccaggctgctgtgcagtggtgcgatctcagctcactgcaatctttgcatccggggttcaagcgattctcctgcctcagcctcctgagtagctggcattacaggtgtccaccatcgtgcccggctaatttttgtatttttagtagagacagggtttcatcatgttagccaggctagtcttgaactcctgacctcaggtgatccatcacttcagcctcccaaaatgttgggattacaggcgtgagccactgtgcccagccccagatctactttctttttttttctttttattttttttgagatggagtcttgctctgttgcccaggctggagtgcagtggcgccatctcggctctcggctcactgcaagctccgcctcccgggttcacgccattctcctgcctcagcctcctgagtagctgggactacaggcacctgccaccacgcccagctaattttttgtatttttagtagagacgaggtttcaccgtgttagccaggatggtctcaatctcctgacctcatgatccacccaccttgacctcccaaagtgctgggattacaggcgtgagccaccgtgcctggccaccagatctacgttctagatcaatgcttttcagttgttctgttttgctctttaactcatcccttaaggatctcttttttcaatgattttatttttgacttccagaaattctacttgaatctttttcagatctacccagaaacaatctctcattctgtactcatgtttttaattctttattgtttttatatcagacttttttttaaggtatacccaagaattatatgaagttattgaaagtggaattctactgtctgacgtttctgctgactcttgctcatgtttccttatgcattttgcattgtgaacccaaatttcacgggcctttatatgtggtattcctatacaacctgtttagaaagtgaatcgctccaaataaatgtttagtttgctttctaataatgtctaataataaaccatacaatatataggttcctgagggttttttcttcaatatttgtgacatatactaaaaagttacttcttattgacattcatctttttttttttttttgagacagagtcttgctctgtnnnnnnnnnnnnnnnnnnnnnnnnnnnnnnnnnnnnnnnnnnnnnnnnnnnnnnnnnnnnnnnnnnnnnnnnnnnnnnnnnnnnnnnnnnnnnnnnnnnnnnnnnnnnnnnnnnnnnnnnnnnnnnnnnnnnnnnnnnnnnnnnnnnnnnnnnnnnnnnnnnnnnnnnnnnnnnnnnnnnnnnnnnnnnnnnnnnnnnnnnnnnnnnnnnnnnnnnnnnnnnnnnnnnnnnnnnnnnnnnnnnnnnnnnnnnnnnnnnnnnnnnnnnnnnnnnnnnnnnnnnnnnnnnnnnnnnnnnnnnnnnnnnnnnnnnnnnnnnnnnnnnnnnnnnnnnnnnnnnnnnnnnnnnnnnnnnnnnnnnnnnnnnnnnnnnnnnnnnnnnnnncgcagtggctcatgcctgtaattccagcactttagaggctgaggtgggtggatcacctcagatcaggagttcgagaccagctggccaacatggtgaaacccggtctctactaaaagtacaaaaattagccaggtgtggtgggcacctgtagtcccagctacttgggaggctgaggcaggagaatctcttgtgcctgggaggcagaggttacagtgagccgagatcacaccactgcactccagcctgggcaacagagcaagactttgtctcaaaaataaataaataaataaataaataaataaaaattaaaataaaataaattgtttaatcttctgtactttctcttcccatcacttgatgttaagccaaattcataaatcccatccccaaatagttgttaaaacttcagtactttacttgccgaaattggcaaattaacaaaacaaaatgtaaaacaaacaaaaaaaccctcaaccttatcactctagattccatttcttcttggttttgatttcctcttggttttgaccttttgggatttcccttgcttcaaaaggaagtcttaggattagtcttttggaaaatggaaggccaaaaatctcacaagtcacttctgcttgttgcattcccacgtacctcccctgaggcagccaggacagatctggcttcctgcttggatggagaaagggcaaaatacaggcaaacaaaacagaaactgattttcccacatagaatccatccatacaggtagcagttttggctacagtcagttatcaggtgaggtcattcttgtgcttactgaaaaagattattttcttcttctcattgtactgcagcaaagccttctagacaagctcagtggaatctgaagggcccaccccatggaggaatgctgggtgacagagatagccaatggctccaaggatggcttggattccaaccctatgaaggattacatgatcctgagtggtccccagaagacagctgttgctgtgttgtgcactcttctgggcctgctaagtgccctggagaacgtggctgtgctctatctgatcctgtcctcccaccggctccgccggaagccctcatacctgttcattggcagcttggctggggctgacttcctggccagtgtggtctttgcatgcagctttgtgaatttccatgttttccatggtgtggattccaaggctgtcttcctgctgaagattggcagcgtgactatgaccttcacagcctctgtgggtagcctcctgctgaccgccattgaccgatacctctgcctgcgctatccaccttcctacaaagctctgctcacccgtggaagggcactggtgaccctgggtatcatgtgggtcctctcagcactagtctcctacctgcccctcatgggatggacttgctgtcccaggccctgctctgagcttttcccactgatccccaatgactacctgctgagctggctcctgttcatcgccttcctcttttccggaatcatctacacctatgggcatgttctctggaaggcccatcagcatgtagccagcttgtctggccaccaggacaggcaggtgccaggaatggcccgaatgaggctggatgtgaggttggccaagaccctagggctagtgctggctgtgctcctcatctgttggttcccagtgctggccctcatggcccacagcctggccactacgctcagtgaccaggtcaagaaggcctttgctttctgctccatgctgtgcctcatcaactccatggtcaaccctgtcatctatgctctacggagtggagagatccgctcctctgcccatcactgcctggctcactggaagaagtgtgtgaggggccttgggtcagaggcaaaagaagaagccccgagatcctcagtcaccgagacagaggctgatgggaaaatcactccgtggccagattccagagatctagacctctctgattgctgatgaggcctcttcccaatttaaacaactcaagtcagaaatcagttcactccctggaggagagagaggggtcttggcactctcttcttacttaaaccagtcccaggcacctagacacggacccgtttttgctgatgagtgttgggactgactcctggaagacagcctggccttgcccacctgcacacagtctgttggataggtagggccacgaggagtagccaggtgggcgagacacaaaaggcctgggacagggctcagtacaagtcaggtcaggcttcatgcctgcatcctccagagaccacagggagccaaagcgagcctccaggcccagcaatgagggacttgggagaaatctgagaagaatgggttgttctcttgggaagtcagggtatcagatgggatggacatccaggtcttctctctgcctaattgtcaaggcctccttggctctggagctatgaaaggccccactttcaagtcacccttgccactgaggaccgaggactatgctatgatgaggattaaggtgttgacttgcctctttcagagataaatgacaagccttcagtttggggcatcctgttgtttgggcgaggaccctctctgatattctgataatccccacctgtaacctcaggtccctggaaatacagaggaggctgggatcgcctgagacacaaaaatctttggagaattttcttgaccctctgaagtccttccagcagcagtcctggtggtgctgctggaagcaggcaatgtcctagtctaacctaactcgaagaaaaaaaggaagatattcacaaagattgtataaatctccaaactgttcccctatctgcccccaattcagctcccttgcctcctccacacccctattacatataataagcagagcaagtgggaggaggggaaatgtccttcctatatgccaggtatggggctgacatttcagtctattgaccccagctagaatacagctccatgattttaaagatctcaggggccaggcatggtagctcatgcctgtaatcccagcactttgggaggccaaggcaggtggatcacctgaggtcaggagtttgagaccagcctgaccaatatggttgaaaccctgtctctactaaaaatacaaaaattagcagggcatggtggcaggcacctgtagtcccagctactcgggaggctgagacaggagaattgcttgaaccctggaggcagaggttgcagtgagccgagattgcaccactgcactccagcctgggtgacagagcaagactgtctcaaaaaaataaaataaaatagatcccagggtactcatttttcatatgagggaggctgggttcctcccagaggagcctaaaacagccaacaagagaaattgttggcggcaggaagattgcagaggaattctaatgcaattatttgggacctcaaatggaataaaatgaaagatattggttaaacatgtcttcgtttaatactttcaagacaaaatatccactagctattcacttattcattcatctcataaacatgagccaggctctgtgcagggtcctgagtacccagccataaatgagactgtgcccctgtctcatggggcttacagtctatatcctgcttgcaagacagccaataagtcaataaagaagataattacaggcagtacaacaaaggaaatatgcaggttcatgtcatgtaatagggattaattgagttaactcaataaacggtaggatagacctaccatgtgccggctcacttttattgagcctttactatgtgccaggcagggggctaagtgtttttaaatgccttatttcacttcatgtttcccaacaacctgataagaaggtcttagttatcttcattttacagatgtggcaacctcaaagatgcaaagtcacttgtctaaggtcaccctgctaagtaccagagctgaggtctccaacctagttctgtttgacttcaaagcctgccctcttagccactaaccttttggcctagttcagtcaaattctgcttgattattgctcattagggataatattagctatctgtagcatcagattgctgcaaagttaactcatcgtagattctcaatatactccattttattaaatggccccgtattaatctcctgtaataaatttcacaaatccagtggcttatcaacagaaatttactctctcataattctggaggccagaagtcaaaatcaaggtgtggtagggccctgctccctccaaaagtttaagggggagaattattccttgactctttcaacttctggcagtccctgtcattccttggcttgtggaaacatcactcctacctctgactctgtcttcatatggcatttcctctgtgtctcttggtgtcttttttttttttttttttttttttgagacggaatctcattctgttgtccaggcaggagtgcagtgacatgatcttggctcactgcaacctccacctctcaggttcaagtgattctcctgcctcagcctcccaaatagctgggactacaggcacccgccaccacactcagctaatttttgtatttttagtagagatggggtttcaccatcttgcccaggctggtcttgaactcctgacctcaagtgatccgcccaccttggcctcctaaattgctgggattacagacgtgagccaccatacccggcctggtgtcttttttaaagaatatcagtcactggatttgggcccaccctaatcctaatagtatgacttcatcttaatttaaccaattatatctgtagagaccctgtttccaaataaggtcacattcacagattccaggtggacaagaagtttaggcggacactattcaactcagtacagacccaggaacaaagtccacccactgggctgtgttgagtggcagtcactagtttatcctccctcaacaagatgagctccaggttgacctctgcatccccagtgctcagtcaggacccagcagagcatctgaagggatctggtcaatatgtgtggaactgaactgtttctgaaaagctctgacgtatgttttggaaaatcaaatcttgttttaatccagacaccaatctttttgtaaggcaaacaagtagcataaatgtttaaaagtcaatttgcatgtttatatactgtcattccttaaagttgaagcatgcctttctttattcatcggtggaatcctttctcattttggcaaagaaaatgcccaagtgcctggcacaaacaagcactgagtaaatacttcttgaatgaataaaactagattctaaaaatcatttgatcaaacgcaactccacactttctacttctctccttttagaaccacactgtatttctgctttttttttttttttttttttttggacatagaatctcactctgtcacccaggttggagtgcagtggcatgcaatcttggctcactgcaacctctgcctcctgggttcaagcagttctcctgccttagcctcccatgtagctgggattacaggtacctgccaccatgcccagctaatttttgtattgttagtagagatggaatttcaccatattggccaggctggtcttgaactcctgacttcaagtgatccacccaccttggcctcccaaagtgctaggattacaggtgtgagccaccactcccagcccctatgtctgctttaagtggagaagcagagcttatgagggaggagaacaagggtgcaaaagggacctagatatcactgagaactgcccttgttgtttggttgaggaaatgggcccagacagtggacaagacttgctcagggagacaaacgagatggtgtccagtgcaacaaacctaggtttcctaacttccagttctgtccactctacatcagtgcctctcacctgtccctgcaggttcacattttggttatgtggataaggagaaataaattgaagatcacaatgtcccattttatcttccccaagacaagctctgtaacattaaagaccactatgcaaaccgattactagaaaatgtgtgtggatgggttcggtttttttcctaaggtgttcatgcttactcttttgggcaatatttcaacataatctggcagaaaaagaaacagaagataaagaaaatagctgtaggccgggtgcagtggctcatgcctgtaatcccagcactttggaaggctgaggctggcggatcacttgaggtcaggagttcgagaccagcctggccaacacggcgaaaccccatctgtattaaaaatacaaaaattagccaggcgtggtggcgtacctgtaaacccagctactcgggaggctgaggcaggagaatggcttgaacccaggaggtggaggttgcagtgagctgagattgcagcactgcattccagcctgggcgacagagcaagactgcatctcaaaagaaaagaaaagaaaaaagaaaagaaaagaaaagaaaacagctgtgattcagcaatagtcattttctctccttgtcactgccagagtgaggaagtgctgggttctgtcaacataggctctgacttctcatgaggtgcaagaaagaagcagcatgaacaaaggcatagattttgcacctggagacacgtattctagtcccacctctgacccaaactagctgcatgatcttgggcagccccccagccctctctgggcttcagttccctcctcggtacaatgggaagggtagggaagaggatggtgcctaggatcttcaaagtcccaactctgatgtgctgccattctctcactggcatgtgggaactgagtgtgctacgtggagtcatgagacttcttcttccttttctttttctttttttttttttttttttttttgagaccgagtctcactctgtcgcccaggctggagtgcagtggtgcgatctcggctcactgtaacctccacctcccgagttcaagcaattctcctgcctcagcctcctgagtagctgggattacaggcgcaccccatgcccggctaatttttgtatttttagtagagatggggtttcaccatgttggccaggctggtctcaaactcccgacctcaggtgatctgcccacctcggcctcccaaagtgctgggattacaggcgtgagccaccttgtctgttcagagacttctgacttccgtatttccctcgctaatggcctcacctcccgtttgagtatgtgcagcatgtgcaaattgcagaggaactggggaacttccctgccaggcaatcctgggtcctcttggctctccacttcctccttccttccttccttcctccttccttccttccttccttcctttctttcttccttggtctggctctgtcgcccaggggctggagtgcagtggcggtatctcggtacaaactaagctatttgaaatgcctcggaattcccaaagaaagctcagtaaataccagacagatgaaacggtcctgcccgctctccctctttcagtacccagttttctctttcctctcctttcataacgtttcttcccatcatccctctacctccttatttctgtcagggctgttagatacccttccggtctgttatctcctcctccagccttgtgctacaggacaactcaaaagccccctatggctcccaagtgatcactaaataaaactcgtgatctcacttcagcctacccctgcaggattgctgcggcaaaatggactactcccagaggcgtgatcacggttcggttcactgcagcccagacttcccgggctcaagcgatcccgaacctcccacctcagcctctcgagtagctgggactccagacgtgcaccactacgccaggctcattttgtttattttttatagagacaggctagtctccaacttgtgggctcagagcgatcctcccgcctcgacttccgaaagtgttaggattacaggcgtgagccactgcgtccggctcaatggactccttcttaaatgtgagttctccgcacacactgggccttgctcacctccacgatttaacctcgcagttaagtcccttttcaaggtttttattcgtccttcagcgaagcgctgtcaacgcctccctgcgtctttcccttcttgagcaccagagggcgctcctccgacccgaggaggaagcgactcgggccaacctgtccaggttgtcccacccctttttccttccgggccaatcgttagtcagagtgggcggagccgcccgcgggcacctgcgcgttaagagtgggccgcgtcgctgaggggtagcgatgcgggctccggggatgaggtcgcggccggcgggtcccgcgctgttgctgctgctgctcttcctcggagcggccgagtcggtgcgtcgggcccagcctccgcgccgctacaccccagactggccgagcctggattctcggccgctgccggcctggttcgacgaagccaagttcggggtgttcatccactggggcgtgttctcggtgcccgcctggggcagcgagtggttctggtggcactggcagggcgaggggcggccgcagtaccagcgcttcatgcgcgacaactacccgcccggcttcagctacgccgacttcggaccgcagttcactgcgcgcttcttccacccggaggagtgggccgacctcttccaggccgcgggcgccaagtgagtgtggtcccggggagcggcgccccttcccggctcgggcggcaaacaggaggtggggctgggcggccagctggggcgcgcagctgccggtcgcccccatgaccccggggcccgcgtgtggcctcctgcggccacaggagtgagcctggcacacctgatgaggaggaggaggtgcgtttgactggggactgataaatgaaggttcagggagatggcaggctgggaagccctgggtatctgcacctgtgcaccgagagggctgagttaggccatacctgatgtccctttcagattgacagcactatcaggactccagggtttcaaatcagtggtgtggagcctggttctaattcaactgtgaacctggacaagtcacttcagcctccctgcagcctcttctatggttgtagaaaggggttatataaggatacaaccctttgagccctaatgtctctaagagggaaagagaggggagttctggtgtgcagtgtatttgggcaacagtacagatagtcattcgtttgctcctctcaatcccttttacgtaggaagtgtccaggaagggtctgactctctctgagaactgttggaacttgggggtggctggttcagagaacagagtagagagcgctggggtggggataaggggagaccacgacccatgaagttgtcaaggcaggggcttgtcctgaaggagtgagccttgagagccctgtattgacagatgttaagtcagggagtggttactatcagcttctagaaagattcattcggctgctgggagagaagtgggttggagaagagtaaaaatggaggcggggaggtttccccagcccctggcttagagcagtcttccatccttaccttggttcctcagccatcttccgggttttcgtttctcttgaactttgaattcacttgtactaaagagaagttacaactggcatttagtgtttgccattaaatgtatgggagtataagacttgattaagcagaggaagtgtttgtctcctaggggccttagggatccataacttacaagtgagaaaaattaaaatctgggagataacctctttccatgccttttatttcatggatgagatgactggcccaaagagaggaaggaatataatgtcctagactccaggtctcatgacgtcaaggttgtttccactgcaccagggtctgcaaactggccagagggattggtcctctgccagttttttaaggcccatgaggtgagaatggtttttacatttttaaagggttgtaaaatgttttaaagaagaatacactacagagaggaatgtgctcccacagagcctaaaatactatctggcccttcaaatcctggagttccctactctggccaatgattgaaccataaagtgcattacctatttttgtgccataaaagcaaattaaatattgagtgatttggttgttatttcaacacttgccttttctcccagttattgggtcttttgtcacctctataataaatgagaggcaatttatgtaggcttggtaaaccaaacagcttagttttctagaaagttttctattttgttgttattgttgttttgaaacagttttgctctgtagcccaggctggagtacagttgcatgatctcggctcactgcaacctctgtctcccaggctcaagtgattcttatgccccagcctctcaaatacctgggactacaggcacacaccaccatgcccggctaatttttgtatttttagttgagatgggttttcgcctcattggccaggttggtcttgaacccctgacctcaggtaatccgcccaccttggcctcccaaagtgctgggattacaggtgtgagccaccatgcctggccagcaaatggcttagttttctattatctgccatttccagtagagctctttctccttcagggcaaagaatgaaagaaagttaatcgttcctaccagaagtgttgaagaatcagagagctaaggtgcacttcttttcccttacccactccttccttccctctgggcctcctcctttgctggggactgagggttgggacttcctcaaatctgcttccattcttggagcaatgcccaaggggaattgtgactgcagcagcttcctggatatcactaatatagtcactggtacaagtacatttgttgtggtcaagttctttcagctatttaaaaagcctcaggcatgctgggcaagttcatgcaagttcactgcccacttcctttgctcatgtggttttgctgtccacaggtatgtagttttgacgacaaagcatcacgaaggcttcacaaactggccgagtcctgtgtcttggaactggaactccaaagacgtggggcctcatcgggatttggttggtgaattgggaacagctctccggaagaggtgagtgtccagggatggttactctgttatctctttggatctggctgtcaagagttctgtacctcctctacttgcgtgtgttttctaggtttgcatatagcaagtagcctgaagggcttttggccttctactcctgtgtgttttctaggtttgcatatagcaagtagccggaagggcttctggcctttgaattggcagtgtttgatgcttcacagttttcacgtgaccaaaggggacaccgttacagaagttcatggccatgtctggttagatgaaggatacccaacatagactacgatgctacttgatgtcctgtttgaggagtaggctgagtgtctgtataaatcataaagtttgattggaacacagccatgcctattcatttatgcactgtctgtgactgctttcaagctacaatttgagagctgagatagagaccaaatggcctgcaaaacctaaaacactgtctggatctttaagagttcactggtcgggtgcgttgactcacacttgtaatcccaggactttgggaggcagaggcaagcagatcatgaggtcaggagttcaagaccaacctgaccaatatggtgaaaccctgtctctactaaaaataccaaaattagccgggcgtggtggcgtttgcctgtagtcccagcaactcgggaggctgaggtaggagaatcacttgaacccaggaggcggaggttgcagtgagccaagatcgcaccactgcactccagcgtgggtggcagagcgagactccgtctcaaaaaaaaaaaaaaaagaaaaaagacaaaaagagtttgctgactcctgtcacctgctcagtttgtttctcagcactgtgctttgcttaaagtcctgctgtaaaactctgagatattgattagatatggacttcaggagtcatgatttttaccatctttatttagtccctgggtcatatgatgaaatacttcagttgttttttatctgtgtaattgcttcttgcattataaggtttttgtaacactcaccattcttaacccaaagcaagctttattaaatatgaaaataggtcatcaaccacatttcattttgtgtacgttaagaactattagtttggccaggcgtggtgacttacgcctgtaatcccagcactttgggaggccgaggcgggtggatcatgaggtcaggagatcaagaccatcctggctaacacagtgaaaccccgtctctagtaaaaataaaaaataaattagctgggtgtggtggtgggcacctgtagtctcagctacttgggaggctgaggtaggagaatggcgtgaacccgggaggtagagcttgcagtgagccgagattgcgccactgcactccagcctgggcgacagagcgagactccatctcaaaaaaaaaaaaaaaaaggaaaaaaagagaaagaactattagtaaatcttagataaataaaacgataaacctatattcatttcaactgtgtggaaaatgttactaatgattatttctgagtaagagtactttgcatatttgattttctattttccagtttctttaaatatgaaattttatgattgacagggaagacattttttaaaaataaggctatatggttttttgttttgttttgttttgtttttgttttgagacagggtctcactctgtcgcctttgctagactccagtggcacaatcttagctcactgcaatctctacctcctgggctcaagccatcc

SEQ ID NO: 932 - DNA, 1906 bp, Homo sapiens
caaagccttctagacaagctcagtggaatctgaagggcccaccccatggaggaatgctgggtgacagagatagccaatggctccaaggatggcttggattccaaccctatgaaggattacatgatcctgagtggtccccagaagacagctgttgctgtgttgtgcactcttctgggcctgctaagtgccctggagaacgtggctgtgctctatctgatcctgtcctcccaccggctccgccggaagccctcatacctgttcattggcagcttggctggggctgacttcctggccagtgtggtctttgcatgcagctttgtgaatttccatgttttccatggtgtggattccaaggctgtcttcctgctgaagattggcagcgtgactatgaccttcacagcctctgtgggtagcctcctgctgaccgccattgaccgatacctctgcctgcgctatccaccttcctacaaagctctgctcacccgtggaagggcactggtgaccctgggtatcatgtgggtcctctcagcactagtctcctacctgcccctcatgggatggacttgctgtcccaggccctgctctgagcttttcccactgatccccaatgactacctgctgagctggctcctgttcatcgccttcctcttttccggaatcatctacacctatgggcatgttctctggaaggcccatcagcatgtagccagcttgtctggccaccaggacaggcaggtgccaggaatggcccgaatgaggctggatgtgaggttggccaagaccctagggctagtgctggctgtgctcctcatctgttggttcccagtgctggccctcatggcccacagcctggccactacgctcagtgaccaggtcaagaaggcctttgctttctgctccatgctgtgcctcatcaactccatggtcaaccctgtcatctatgctctacggagtggagagatccgctcctctgcccatcactgcctggctcactggaagaagtgtgtgaggggccttgggtcagaggcaaaagaagaagccccgagatcctcagtcaccgagacagaggctgatgggaaaatcactccgtggccagattccagagatctagacctctctgattgctgatgaggcctcttcccaatttaaacaactcaagtcagaaatcagttcactccctggaggagagagaggggtcttggcactctcttcttacttaaaccagtcccaggcacctagacacggacccgtttttgctgatgagtgttgggactgactcctggaagacagcctggccttgcccacctgcacacagtctgttggataggtagggccacgaggagtagccaggtgggcgagacacaaaaggcctgggacagggctcagtacaagtcaggtcaggcttcatgcctgcatcctccagagaccacagggagccaaagcgagcctccaggcccagcaatgagggacttgggagaaatctgagaagaatgggttgttctcttgggaagtcagggtatcagatgggatggacatccaggtcttctctctgcctaattgtcaaggcctccttggctctggagctatgaaaggccccactttcaagtcacccttgccactgaggaccgaggactatgctatgatgaggattaaggtgttgacttgcctctttcagagataaatgacaagccttcagtttggggcatcctgttgtttgggcgaggaccctctctgatattctgataatccccacctgtaacctcaggtccctggaaatacagaggaggctgggatcgcctgagacacaaaaatctttggagaattttcttgaccctctgaagtccttccagcagcagtcctggtggtgctgctggaagcaggcaatgtcctagtctaacctaactcg

SEQ ID NO: 933 - protein, 360 aa, Homo sapiens
MEECWVTEIANGSKDGLDSNPMKDYMILSGPQKTAVAVLCTLLGLLSALENVAVLYLILSSHRLRRKPSYLFIGSLAGADFLASVVFACSFVNFHVFHGVDSKAVFLLKIGSVTMTFTASVGSLLLTAIDRYLCLRYPPSYKALLTRGRALVTLGIMWVLSALVSYLPLMGWTCCPRPCSELFPLIPNDYLLSWLLFIAFLFSGIIYTYGHVLWKAHQHVASLSGHQDRQVPGMARMRLDVRLAKTLGLVLAVLLICWFPVLALMAHSLATTLSDQVKKAFAFCSMLCLINSMVNPVIYALRSGEIRSSAHHCLAHWKKCVRGLGSEAKEEAPRSSVTETEADGKITPWPDSRDLDLSDC

SEQ ID NO: 934 - DNA, 191284 bp, Mus musculus
  misc_feature (1)...(191284): n = A,T,C or G
ctctgctggccgagggttgaggcgtgaattctttacaaggctcagtgggaagggagctgtgctcttcccttccttttcctactcacctttaggttctaccaatgctgtgtttgcggatttccaaaaaattcaaccaatgtgtgcacctgtgagggagtggaatatgtatttatattaaatatctttagatcatactaaaatctctgcaaagtggctgcttttgtgggtaaagtatttgtgtaggagccgtgcttcttatgaatctgtgatcacttgggcgactgaagcggaaggatcgtaagtctgaggtgagatcctgcttcaaaacaaagctaaagtaaagtaacttaaacacactttgagaactcctgctttgaattactaatagtgtgattataaatgctcccatttgttgactgtctaccatgtgctggcttgcttaagactatcatgttaaattagccatggtaaatactcctgtaatcctagcacttgggagcaggtggaagcagaaacttcaggagttcaagaaaatcttgatttataataagttagaggcagcttgtgctgactgagacgctgtctcaaaatccacttgtctgtcctgtacagtttaggatgtgcggcttggcagtggatttgggttgcagttcaggtctaactttaaaatgcacaattttgcccttatattgcagtatatcttgggttacatgaattggtgagatttatgtacaatactatgtagtcttgaatgtcccattggtcagttagattgtgcatttttattttattttattttttggttttttgagacagggtttctctgtgtagccctggctgttctggaactcgctctgtagaccagactggcctcgatctcagaaaaatttgcctgcctctgcctcccaagtgctgggattaaaggtgtgcgccaccactgctcggctagattgtgcatttttaaaactttttttttttttaaagtgaacatggaggtatatgcctgtacccatcttctcaggaggccaaggccaggtggattgcttgagcctaggcagtagagtgagtgtcccccatttcccaaaacaaacagatttgcatcctgagttttggtctgttggggcatacatattgtggcgatgatgtggccaccttagttcttatgtgctgacttaaaggtggaatttgctttgctgccagcttagagccggtctggttccctttgtgagggtatgattcctgggacagggcagagctgagcaagccagggaaggaaactggctgctaagatgaagagattatatataacttgtccgagggacagcgtcgtttatccagtgtatattgtatttggtgccactgtgtagaaaccaatagctggtgtgatgaaccagttaacactcaggtacatctacttgcttccttttacctttaaagtacttttaaatttttgctagggtctcattatgtagccttcgctaacctggaacttgctgtgtggaccaggctggcctcaacctcaaagagatcctcctgcctctgcctctctgcccctctgcgcccctctgcgcctctctgcctctgcctctgcctgccaagggctggcataagtcacccccacccactccatcttagaacctttatccagctgtccttgtttttatacttgccagtgacccatgtcttagccatttctcccttctaagcctctagtcattggtattttgggtcattttagaacatcactaattttagaagcatcctttagagttgtgatcactaattttagaagcagcctttaaaggttgctaggatgtgtatgtgtagacattctctgcaagatacatgagcagctaaggagtggcgactggggattcagacggggcaagtgctccccagagcttgcttacagtgctgtaggtgtgacggactcttttcttcagtagtgacagcgatcttagaagaaccctgaggaacacagcatgtctgtgagctctagacaacggtcgtgtctttacttttctttgtcttgtttttgaaatgctttttattttgaggcagggttttgttctgcagtcctggttgacctagtatttactatggagtacatttgtaggtcatgaagccataaagatgagcttgcaaactctccatgggcttggctttctactgtggccattacaggagttagctgtgtggccttgaggaggtcactccaactctctgcctttttacccctttcccgttttcccgtgtgttagccatggctttactctgtgtatttatttcaggatctcttctacatctctgttgtaatttcatatccagtttataccagaagatgaagtccactcttccttaactctgacagaaaactttctaattaccacggatctagtaacctttagtaagttttaattaacctggtcttgcaacctgatttgtctcccaggtgagctgtcttgaggcttccttaagttgtccataagcatttataaaatcttacggagagggagcctggaaatttccatccatgaaggcggatgtgaggcacaccaccatttctggccttaacagtagagaatgagtctttgcttacagccccaaagggcatatgcggtctccatgcttgctgtctgtagctcctcaagggttctctaccacttctactccaggctttagctcctgtaggattagaacacttggggtccacaccaaagcttgcttattgtttcaaaagcgataaggttagtggatgttggtggtgtcaggttgtgctgtgctatgcaactgcagtcttgagaattttttcagagaggttcctttggggatgtggccttttgaaacacctggtgcagatgttaagcctcctgctgtcccatcaagcaaaattgatgggattatgggtcccaagtcactcacagagacagatgacagtgcactgtgtgcttctgagtgaaaggacgagtgggacacaaagctgcagctcccagctagagctgcagagaggctgtgggagcagagtctttctctctgctccctggtggtagacacgctcagtggctgcccgcttgcagagctctcccgtgtccatggaccttcagcctagttgtctcgaggagatggcctctacagaagctgacccatcttcctcttcatttgccctttttttgtttttcttaaactatatactgtgacattgaaaggacttgtgttcaccagaaagacaaagagggctttcatggtggggctctgcagagccgctgtgtgggcctttgttgggcttgcgctggcccactgcataccacccccacctcgcaggctgcactttgcatctgtaacagagaagttggcctctttatttaatggtacacagttgcaaaagtaaaatcagatttcttggagtcaatgtaaactgaggtcttccctgtttttggatcgggtatggaacccttttgcacggaggtgccacacactgagccttggtcttgttaaaatcattttctattatttaaaattcaaatgttttgtttttgtgtggctgcagctctgtgacttcattgctatgcttagtatttattcatgagatataagaatcggtcagcagtgtcaggtgttatttcagttcatttttaataaaagatttgtgtttttgtgtgcttacacaaacacacatgcatgtgtatacacgtgcgtgcatggacacatacattctaggcatttgagtgcaggtgtagtggaggccagaggctttggcgccccctgaagctggagttaaggttaattacacgtggnnnnnnnnnnnnnnnnnnnnnnnnnnnnnnnnnnnnnnnnnnnnnnnnnnnnnnnnnnnnnnnnnnnnnnnnnnnnnnnnnnnnnnnnnnnnnnnnnnnnnnnnnnnnnnnnnnnnnnnnnnnnnnnnnnnnnnnnnnnnnnnnnnnnnnnnnnnnnnnnnnnnnnnnnnnnnnnnnnnnnnnnnnnnnnnnnnnnnnnnnnnnnnnnnnnnnnnnnnnnnnnnnnnnnnnnnnnnnnnnnnnnnnnnnnnnnnnnnnnnnnnnnnnnnnnnnnnnnnnnnnnnnnnnnnnnnnnnnnnnnnnnnnnnnnnnnnnnnnnnnnnnnnnnnnnnnnnnnnnnnnnnnnnnnnnnnnnnnnnnnnnnnnnnnnnnnnnnnnnnnnnnnnnnnnnnnnnnnnnnnnnnnnnnnnnnnnnnnnnnnnnnnnnnnnnnnnnnnnnnnnnnnnnnnnnnnnnnnnnnnnnncacgtgcgtgtgtgtgtgtgtgtgtgtgtgtgtgtgtatgtatgtgtgcgcacgcacacacacactcgtgcatttgttctcgagtgaaacactggcagcaacaagaagacattgaagtttttgcttagcttttgtgtgtacatgtgtgcctctcatgtaaacatgtgtgcctctcgtgtatacacgtgtgcctcttgtgtgtacacgtgtgtctcttgtgtgtacatgtgtgccatatgttgctgtgagagtgagtgactgaggtcagctgtcttctgtcatgttaccttcagttttgaggcagtctctcacctgacagtagtgagcccaggagcctcctgtgcctgcccactccattgctggtattcctgcccccccccccccccattgcacttagctactttgcaggacgctgaggggcggggtttggagcttcgtgagtatgtggcatttcttcagacactgccaccccacttgtttgtttgtttgtttgtttgtttgtttatttttgagacagggtctctacagagccttggctgttctggaaatcattttgcctccccttgagtgctggggttaaagatgtgtgtctccatgccctgcttgggtgctggggttagagatgtgtgccaccatgccctgcttgtcctttgttttttgaattacggttatcccgtgttcctcattaagcactcacacttattgtctttgatgaagtagcaaaagctattaattatattaaaccctgactctgaatatacacagcctttttaatactccttgagaagctgggggttacatataaggcactgtctaatagtagtcttacctaagaacacatacatctggctgttgtactacacacctgtaattctccagtactggagagacgaggcaggaagagtccgtctccagtccagcctgggctacatgagtctgttttagcgaaccaaataaccccgaatcaaaccaaatcattttcccactcctccaaagacatcctgttgtctgtgttcctgtctctccagattacaagttagtggacctacctacctaaagtattaactagtgtagttggggttagttgccttagtcacactgatttacaatgataaaacattcatcatagcaattcaagctaagaaatcaccagtggagagagggcgctgctgtacacactgcggctgcagaaagcctggatgtggtgtctgtctgcctgcgcctctcttggcctcctagggctcctgcacatacctggcaaacactcacaagtacaaataaaccttatttaaaatatttaaaaatttaaaaagaaaatacttttagtctaaaggggcataaacagcctgtgtcttaggctaagtccagtcagctctaaaatcacttcacacgcttcacacgcttcattccagagctcacctctgagcggatagatacccagcagcgccgacacaccagctagggtttttagtaaagaggtgggctaagcttcaagttagtgaagtatctgctcagggtttctgaggattgcatttaagtaaatctccctttctttttgagttgtgtatgcacacacacgctcatgagtgcaggggcccacagaggccagaaaaggatgtcgggtcctctggagctcaagtcggaagtgatttttcgctgcctgatgtgagtgctgggaactgaactcagtcctgagccgcatctccagccttctctcttgcttatctttttaggcaagatctctgaccagtccaggctactctcctgcctcctcttcctgagctaggattgcagccaccacacccagtgccctcggttttttgtttttttcttcctttcctttcctctttcctcccctcccctcccctcccctttcctttcctttccttggttggatttggaaccaggcttggtctacatcgattgatttttattttcctgggctttgtttttaaatagaactgtagttttgttttaaacagtcaacggtaattttttttgttaatttgcagaatataaaaatgaaatcagcatttttatttgtagaaacaggaagaatatttgttcctgtaacatgggcaaatgatgtctctagcaatcctgtaattacagtcatctgattaaccagcagaggaaccgagagcagaagtcctgagtggctcagcttctcgggcagaacactagggactccctggagaactcttctcccatcgtgagaattagttcttcctggaaacgcaacggttgttggcagtagagcagtcgtgtggctcactctccatctgctgtaagagccatagaatagtgtgtgatgtgtgtgtatggtgtggtgtggtagattgtgtataaaatgtgtgtatgtataatgtgtgctttgtatagtgtatgtatatagtatatgtgtgtgtgtatacatatatatatacatatatacacacacatgcatacacatactccacacagtatgtatgtgtggtgtgctgtgtggagtatgtgtatgcatcgtgtgtgcacacacagtgggtgtgggctgtgcatgtggattgagtggtgtgtatgttgcgagtggtttggctgaggcgcttcctttctgtgatgtttcagctcctctccagcacagcgtttacggctttgtgaggggacatggacagtgtgtttagctgttgtgtgaggttgctagtttaagaacgtctagagactgctatagtctctttagacattttaatgattaaagcacagggtgtgtttgttttgttttcagtcttctgagctggctgcttggatataaagaatctactaatgagtcagcctttggcaactcagagtcattcttaaaaaatcaagcacaaaacacaacacagcacaacagaaaacagcttttttcctttcattctatttattatttataagatttattcatttcatatgtatgagagttttgcttgtatgtatgtatatgtttgtatgagtgtatgtatgcaaaccacgtgcatttcttttgcctgtggaggtcagaagaaggaattagctcctctagagctgcagttagaactagtctgagctaccatgttgtgttggtaactgagggcagacagggagtgtctcaattcctcagctatttctctagctcttcgctttttgaaggagtctcactgtgtaaccctgactggcctaactgaacgcaccctgtgaccattcttgcctctgtctcctcggtgctgagcgtccagttgcaagccgccacacctgttcatagctcatgatttgtctcccacactctttcagtgaatcacaaagaaaccttatatgagaagtattaaggattttgttgagggaattttttttcacttggggtttataacacattacttaaaaaggagttgactggctggagttaggctacaggattgttggctttatttatttatttatatgtgaaagtaaaataattgggttagagagatggctcagcggttaagagcatcgactgctcttccagaggacctgagttcaaatcccagcaaccacatggtggctcacaaccgtctgtaatgggatccgatgccctcttctcgtgtgtctgaagagagcaagagagcagtggtggagtatgtatactcatatgtataaaataaataaatcttaaaaaaaaaaggtaaaataatttgtatcatttgtatctattgtagaaggcacataacctggccatgtcacagtgtcatgcagagacagtgctgtggcctttgtcactctcacagatgtcagacgggaagcactggaagcagcactgtccccatagccacactggctgagatggctcctatctctcccccatagccacactggctgggatggctcctatctctcccccatagccacactggctgagatggctcctatctctcccacatagccacactggctgggatggctcctatctctcccatagccacactggctgggatggctcctatctctcccatagccacactggctgggatggctcctatctctcccccatagccacactggctgagatggctcctatctctcccacatagccacactggctgggatggctcctatctctcccacatagccacactggctgggatggctcctatctctctcccatagccacactggctgggatggctcctatctctcccccatagccacacaggctgggatggctcctatctctcctacatagccacactggctgggatggctcctatctctcccccatagccacacaggctgggatggctcctatctctcccccatagccacacaggctgggatggctcctatctctcccccatagccacacaggctgggatggctcctatctctcccatagccacactggctgggatggctcctatctctcccccatagccacactggctgggatggctcctatctctcccatagccacacaggctgggatggctcctatctctcccccatagccacactggctgggatggctcctatctctcccccatagccacacaggctgggatggctcctatctctcccccatagccacacaggctgggatggctcctatctctcccatagccacactggctgggatggctcctatctctcccccatagccacactggctgggatggctcctatctctcccccatagccacacaggctgggatggctcctatctctcccccatagccacactggctgggatggctcctatctctcccatagccacacaggctgggatggctcctatctctcccacatagccacactggctgggatggctcctatctctcccccatagccacactggctgggatggctcctatctctcccacatagccacactggctgggatggctcctatctctcccacatagccacactggctgggatggctcctatctctcccacatagccacactggctgggatggctcctatctctcccacatagccacactggctgggatggctcctatctcccagtttgaagttgaataaaatgagtcttctttcttttaatgcaatgtcttttttgtgttctgaaatattttaagtgactgctggagtacctgattttgcaaatggaaagctggtgggttgttggagggtaattagctcaattaaaacatttatagggccaggcagtggtggcaaacgcctttaatcccagcacttgggaagcagaggcaggtggatttctgagtttgaggccagcctggtcttcagagtgagttccaggacagccagggctacacagagaaactctgtcttcaaaaaaacaaaaaacaaacaaacaaaaaagatttataggaataacaactacagaaaacaagggaacaagtgtgtttgccctgccctgtgtatggttagaacagaggggaacacagccaacggtttctccagcttagccttaaaccaaggcagcctctccggtgctggctgaccttgctttcctcgctgtgcgctgtgttgcttgctcctctctaacggcggttgactctcaggatggttttgaatgctctggccctacttttcatgtccagtgggaacgatgtggagaaatggagctaatctcatcaggaggtttgaaatggttgcttttccagtttcttgggaggagtaagtgtccagggccaaaggttgggtacaaagtgtgggtccctggctggacactctgccactgctgagccgttctgcttgagttctcttttccttaactcgctcgccttccaggattccacgaggaccggtgcagcagcctttggaggatcggctcttcccacctacggtctctgcagtctatagcacggtgagcatcccggtggctggcaggctggctgtgaatgcagtgcctggggtggaaaagtcaacaaaatcccagtgagatcaggtgcatgttacgtgaccaggtaaccttcactcacattgacatctaaggaggagacctgaggtgaacattgtgttgtgatccactgtagttctacacccgccctttcccttccccctttcctacatgtggattaaaccctggggacatagtacatgtgtgtactagatgctcaggcacgccaccgcaatgacagcctccactgcttggaaagnnnnnnnnnnnnnnnnnnnncccctcccctccccctttcctttcctttccttggttggatttggaaccaggcttggtctacatcgattgatttttattttcctgggctttgtttttaaatagaactgtagttttgttttaaacagtcaacggtaattttttttgttaatttgcagaatataaaaatgaaatcagcatttttatttgtagaaacaggaagaatatttgttcctgtaacatgggcaaatgatgtctctagcaatcctgtaattacagtcatctgattaaccagcagaggaaccgagagcagaagtcctgagtggctcagcttctcgggcagaacactagggactccctggagaactcttctcccatcgtgagaattagttcttcctggaaacgcaacggttgttggcagtagagcagtcgtgtggctcactctccacctgctgtaagagccatagcatagtgtgtgatgtgtgtgtatggtgtggtgtggtaggttgtgtataaaatgtgtgtatgtataatgtgtgctttgtgtagtgtatgtatatagtatatgtgtgtgtatacatacatatatatatatatatatatatatatacacacacatatatgtatatatatatatatatatatacacacacacatatatgtgtgtgtgtgtatggtgtggtgtggtagattgtgtataaaatgtgtgtataatgtgtgctttgtatagtgtatgtatatagtatatgtgtgtgtatacatatatatacatatatacacacatatatgtatatatatgtgtatatatatatgtgtatatatatatgtgtatatatatgtgtatatatatacacacacacacacacacacacagtatgtatgtgtggtgtgctgtgtggagtatgtgtatgcatcgtgtgtgcacacacagtgggtgtgggctgtgcatgtggattgagtggtgtgtatgttgcgagtggtttggctgaggcgcttcctttctgtgatgtttcagctcctctccagcacagcgtttacggctttgtgaggggacgtggacagtgtgtttagctgttgtgtgaggttgctagtttaagaacgtctagagactgctatagtctctttagacattttaatgattaaagcacagggtgtgtttgttttgttttcagtcttctgagctggctgcttggatataaagaatttactaatgagtcagcctttggcaactcagagtcattcttaaaaaatcaagcacaaaacacaacacagcacaacagaaaacagcttttttcctttcattctatttattatttataagatttattcatttcatatgtatgagagttttgcttgtatgtatgtatatgtttgtatgagtgtatgtatgcaaaccacgtgcatttcttttgcctgtggaggtcagaagaaggaattagctcctctagagctgcagttagagctaagtctgagctaccatgttgtgttggtaactgagggcagacagggagtgtctcaattcctcagctatttctctagctctttgctttttgaaggagtctcactgtgtaaccctgattggcctaactgaacgcaccctgtgaccattcttgcctctgtctcctcggtgctgagcgtccagttgcaagccgccacacctgttcatagctcatgatttgtctcccacactctttcagtgaatcacaaagaaaccttatatgagaagtattaaggattttgttgagggaatttttttcacttggggtttataacacttaaaaaggagttgactggctggagttaggctacaggattgttggctttatttatttatttatttatttatttatttatatgtgaaagtaaaataattgggttggagagatggctcagcggttaagagcatcgactgctcttccagaggtcctgagttcaaatcccagcaaccacatggtggctcacaaccatctgtaatgggatccgatgccctcttctggtgtgtctgaagagagcaagagagcagtggtggagtatgtatactcatatgtataaaataaataaatctttttttaaaaaggtaaaataatttgtatcatttgtatctattgtagaaggcacataacctggccatgtcacagtgtcatgcagagacagtgctgtggcctttgtcactctcacagatgtcagacgggaagcactggaagcagcactgtcccccatagccacacaggctgggatggctcctatctctcccacatagccacacaggctgggatggctcctatctctcccacatagccacacaggctgggatggctcctatctctcccacatagccacacaggctgggatggctcctatctctcccacatagccacactggctgggatggctcctatctcccagtttgaagttgaataaaatgagtcttctttcttttaatgcaatgtcttttttgtgttctgaaatattttaagtgactgctggagtacctgatttttcaaatggaaagctggtgggttgttggagggtaattagctcaattaaaagatttatagggccaggcagtggtggcaaacgcctttaatcccagcacttgggaagcagaggcaggtggatttctgagttcaaggccagcctggtcttcagagtgagttccaggacagccagggctacacagagaaaccctgtcttcaaaaaaacaaaaaacaaacaaacaaaaagatttataggaataacaacaataacaactacagaaaacaagggaacaagtgtgtttgccctgccctttgtatggttagaacagaggggaacacagccaacggtttctccagcttagccttaaaccaaggcagcctctccggtgctggctaaccttgctttcctcgctgtgcactgtgttgcttgctcctctctaacggcggttgactctcaggatggttttgagagctctggccctacttttcatgtccagtgggaacgatgtggagaaatggagctaatctcatcaggaggtttgaaatggttgcttttccagtttcttgggaggagtaagtgtccagggccaaaggttgggtacaaagtgtgggtccctggcaggacactctgccactgctgagccgttctgcttgagttctcttttccttaactcgctcgccttccaggattccacgagggaccggtgcagcagcctttggaggatcggctcttcccgcctacggtctctgcagtctatagcacggtgagcatcccggtggctggcaggctggctgtgaatgcagtgcctggggtnnnnnnnnnnnnnnnnnnnnnnnnnnnnnnnnnnnnnnnnnnnnnnnnnnnnnnnnnnnnnnnnnnnnnnnnnnnnnnnnnnnnnnnnnnnnnnnnnnnnnnnnnnnnnnnnnnnnnnnnnnnnnnnnnnnnnnnnnnnnnnnnnnnnnnnnnnnnnnnnnnnnnnnnnnnnnnnnnnnnnnnnnnnnnnnnnnnnnnnnnnnnnnnnnnnnnnnnnnnnnnnnnnnnnnnnnnnnnnnnnnnnnnnnnnnnnnnnnnnnnnnnnnnnnnnnnnnnnnnnnnnnnnnnnnnnnnnnnnnnnnnnnnnnnnnnnnnnnnnnnnnnnnnnnnnnnnnnnnnnnnnnnnnnnnnnnnnnnnnnnnnnnnnnnnnnnnnnnnnnnnnnnnnnnnnnnnnnnnnnnnnnnnnnnnnnnnnnnnnnnnnnnnnnnnnnnnnnnnnnnnnnnnnnnnnnnnnnnnnnnnnnnnnnnnnnnnnnnnnnnnnnnnnnnnnnnnnnnnnnnnnnnnnnnnnnnnnnnnnnnnnnnnnnnnnnnnnnnnnnnnnnnnnnnnnnnnnnnnnnnnnnnnnnnnnnnnnnnnnnnnnnnnnnnnnaaaaatttcagtttccccttcgtaaatgagtgtttttcccctcccctccctggttacatataaaatatgcatcagtattgggaagtgagtataagagattgatatcaatcgtgttgaatgaggaatcgataagagaaggctcacttttcagtcataggatgcgtttgctaaagtggtaagttctcccgtgaacccatgagaacttgagagactgagtaataggtcccattcttcctgccatctcgccctgtgttgtaacggctgagttctgagtcactgtcgctcttggccagtattagagagtgagcccagggcctgggaagtgctaggtagtgcctgccactgagaagagtttgggtatgttgtctttaaacagaagaaaggcttcacgtagtttaggtgtttgtattaaatgctttggtagaatacagtaaggtaaatgggtagagattttctttgaaaagacattttagggtctagaaagcctggaatggctgtgcactctgtaatgccagcacgtggaggccaaggctggaagactctagtctcaggctagcttgaggtacttggtggacccttgcccagcgtgtgcactgttctggattcaggcgccacactgccaggaaaagcaagagcagtggtggctaaagaccttgcagtacagagcccctgagatggccatgggtagcagaggcttcaaagtgcacatgcttgcatggagagatgttggacttgcgtcatgagattacacagggaattatggggtataggacatgaggttacatgggggaattatgggttgtgggacatgagattacatggggaattatggggtataggacatgagattacatggggaattacgggttgtgggacatgagattacatggggaattacgggttgtgggacatgagattacatggggaattatggggtataggacatgagattacatggggaattatggggttaggacatgagatacatggggaattattggatgtgggacatgaaataccagggaaatattgggcacatagaggttttagagcttatcctgtctaatggaatacaaagggagggtaaagagaaacagaaccaattgcctttaaattggcgctatagctacagcatgggaatggaggatggaggcgagtgagacacaggagggtcaggaaagacattggccagttggtgtcttagccaggtttccattgctctgaagagataccatgaccaaacttctcgagacaaggcttctttgaatagctttgggtgacctgacactaactctgtagaccaggctgccctcaaaactgagatcccctgcctctgcctccatagtacttggagtaaaggcgtgcgtcaccgcatctggccttgactgaagcaactcttacaaannnnnnnnnnnnnnnnnnnnnnnnnnnnnnnnnnnnnnnnnnnnnnnnnnnnnnnnnnnnnnnnnnnnnnnnnnnnnnnnnnnnnnnnnnnnnnnnnnnnnnnnnnnnnnnnnnnnnnnnnnnnnnnnnnnnnnnnnnnnnnnnnnnnnnnnnnnnnnnnnnnnnnnnnnnnnnnnnnnnnnnnnnnnnnnnnnnnnnnnnnnnnnnnnnnnnnnnnnnnnnnnnnnnnnnnnnnnnnnnnnnnnnnnnnnnnnnnnnnnnnnnnnnnnnnnnnnnnnnnnnnnnnnnnnnnnnnnnnnnnnnnnnnnnnnnnnnnnnnnnnnnnnnnnnnnnnnnnnnnnnnnnnnnnnnnnnnnnnnnnnnnnnnnnnnnnnnnnnnnnnnnnnnnnnnnnnnnnnnnnnnnnnnnnnnnnnnnnnnnnnnnnnnnnnnnnnnnnnnnnnnnnnnnnnnnnnnnnnnnnnnnnnnnnnnnnnnnnnnnnnnnnnnnnnnnnnnnnnnnnnnnnnnnnnnnnnnnnnnnnnnnnnnnnnnnnnnnnnnnnnnnnnnnnnnnnnnnnnnnnnnnnnnnnnnnnnnnnnnnnnnnnnnnnnnnnnnnnnnnnnnnnnnnnnnnnnnnnnnnnnnnnnnnnnnnnnnnnnnnnnnnnnnnnnnnnnnnnnnnnnnnnnnnnnnnnnnnnnnnnnnnnnnnnnnnnnnnnnnnnnnnnnnnnnnnnnnnnnnnnnnnnnnnnnnnnnnnnnnnnnnnnnnnnnnnnnnnnnnnnnnnnnnnnnnnnnnnnnnnnnnnnnnnnnnnnnnnnnnnnnnnnnnnnnnnnnnnnnnnnnnnnnnnnnnnnnnnnnnnnnnnnnnnnnnnnnnnnnnnnnnnnnnnnnnnnnnnnnnnnnnnnnnnnnnnnnnnnnnnnnnnnnnnnnnnnnnnnnnnnnnnnnnnnnnnnnnnnnnnnnnnnnnnnnnnnnnnnnnnnnnnnnnnnnnnnnnnnnnnnnnnnnnnnnnnnnnnnnnnnnnnnnnnnnnnnnnnnnnnnnnnnnnnnnnnnnnnnnnnnnnnnnnnnnnnnnnnnnnnnnnnnnnnnnnnnnnnnnnnnnnnnnnnnnnnnnnnnnnnnnnnnnnnnnnnnnnnnnnnnnnnnnnnnnnnnnnnnnnnnnnnnnnnnnnnnnnnnnnnnnnnnnnnnnnnnnnnnnnnnnnnnnnnnnnnnnnnnnnnnnnnnnnnnnnnnnnnnnnnnnnnnnnnnnnnnnnnnnnnnnnnnnnnntatgggacgaacctaatcagaagtccacagttgtacagacacagatggttgtgttgtaccttggcaggggagtaaggaatgtttatcgtctcctataataaagtcagtaggctatgaagatgtcttgactgtgctgtgtaagagaaagtgtgtcatttctttggagtctgacttgaggaagctagtcctgttggtcctgtccattggggggtcattctgagaaagatttattgacacaagtcaccttcctgtaagcaagtattactttggtattagagcattaggtgattttcatatttttgctgttataaaatagctgaattttataattcctgtgttttggatgatttttatagaatatatttctgaaaatgaaattaatacattaagaacaagtgtgttgcccatatgtgcctgtaatcccagcattagattgtgtgtctgtgtctgtctgtctgtctctaaggcaaggccagcctgggattcatggtgaagtatcctaaaacatgttattaggattcctcatgagtaagactttgacagtatgtacactcacacttggaagacaagtccatgagaactctgagattgacgggatgaccgtgagggaggctgctgccacctgagccttcttaccttgcacagaggtgcttgactgtcaggtgttggtttgtttgtgagttatttgacttttactacttagagttgctgtggtacactcaccatgtgcacattgtatattgtgcttctcctaggaggaggaggaggaacttcaagcattagcagctctcctgaaatacgatgttctcagcctgctgtgctagctcaggtctttcttctcagtactccaaaggcagaggcacgtggatctctgagttgaggccagccaaagcttcagcgtgaggccttgtctcagaaatcaaacccaaaacagcagcagtaacaggaatagcgatgttgttttcttttgtatgttttttttgttttgtatttctggtttctatactctagttcttgctccattgcctaagtggtctaatctgttgggtgaagcagtcctgctgccttaggcttcctactagctggtttcttctccagtttaaaaatgacatttatttattagactttgggacaaggctttacagtgtatccctagccgtccagacttgagatatagactaggctggccttgaactcactgcgctttgcctgcctgtgcctctggagtgctggcatttttaatgaattatttataatctttcttgtttgttagtttgtatgttttacatgagtggtactttctatctctggctgtcctggagcttgctctatatgccagactggcttagatttacggagaccctcctgcctttgcttcctgagtgctgggattaaaggcatgtcctgccatgcctggcaaagtatttacattcttaatagtttcccactcatcacttttacagtactgtgcacattcttgctagtgaggagagagctatgtgactggatgccctcagtcgttagtccccatctcagcaacaggattttgtgtctggtcattatttttctgtaggttctttcggcctacgtctctgtcgtcctctcctgccttggcacgtggtgcacatatgccatgtggtgcccatatgtcactgggattgagttggttaaattccttgaaaggcagtagtactcctggccaatgtttaaagcccacactctgcgtttgtagtggctgctttcccctagattaggagtagtcatttcaggtggaagctctgctgctcatcagaaggaagccagggttggacagacctctgcaatgccttcttatgttagctgggttctttgtatttagttattttaacttggtttatacaaatttgtctttgaagtatttatcaaagataaatcaaatttgagggattggtcctattaatgaaccatgaacattcaaacaagtacttgaaaaactgtaacagtgcagtgtacaaggtagagagaggcactgccacaccagggcactcaggaggcactggctctctgtggtgtgttcattgataactttcaggagtaggagctgtgagataagcctgccgtgcatagcatataattttgtcttctgtattaagagaaatttagttttctgactattaagctagtgtgtgatgtgattgcagtcatacttagtaattgaataacaactgctctcagggcagaagtctctttcgaataactggaaacttgcttatgagagagagactctgtgtgctaagttgctctttaagattagagaatgtctttgatgctgtcagctttgatccttataagcagtttgcactttatatatcatttaggtcctgcttctcgtatcttgtagctggatggaatgtttagaaagatcttgtttccacgatttttcctatagccgctgcatattgagtaggtaggctggcagtggtagtcctactgccgagggacgtgaacttgctccgtcaggtcttggagcatccagccacgtggaagttggcttgcctgtgctgtctccccatcgaataactgtccattgcttttaacccagttggggcagtggtttgttggcaccgtttgctgagctgaagcttacgtgcagtgcaccttaggaagggcaggcatgagaacccaggaaacactcagtgagaacccggagactcttagtgcgtgtgtcttagacaggcctcaaactcagggcagccttccggtctcagcctgctgtcttgggcctctttataacccacttacacactcacactctctcactcccctcccccctttctgagtgtgtgtgtgtgttcattccatgtgcgtgcacacgcatgtttgtgtgctgaaagtgcccggactgaacctgtgtttgagcttgttgaaagcaactgttgctttttccttttttgtttagttagtttgtttttaagatatgttctttatatgatatagcgctggctgccctggaactcactatagagcagagagctggggttatagcatgtataactgttctcagttcctaccttgtcgtttgagaaggtctctcatttgagcccaggactcactgtttggccttgactggctggccaggaaactcttggagtgcctgtttttgtgctgcctatgttggcttcagatgtgtgccagcatgcactgcatttatgtgggtactggggatccaaactcgggtctcgtgattgcacgctctccaccaatcgtgattactgtctctgtagagtactctgtccctgcacctcgggactcagagtctcagtattaacaatctagatctgcttttctgcctgtctttgtaactgctaattaatgacatttatgaaagtttacattctttgttaatatttaatgtggctttctcattaaatgttaaatcagagagctaattaaaatattatttaatatggatttgcttgatttttcctctttcagaagaaggattaaccatggagatgtgaaggcgtgctctctctgctggtaaatgccagctaggaatggctttcagctctcaagcaggagtagggagaatctgcgccagggcgctttgctttggtagaatgctgctttagcctgtggaatattccaccccctgcgccattttataaagtgtcccgagaatcattgctcagaggcagagcagctccatggagcagtagcggtcagacagggcctcgaagttggatgacggttagtgccgtgccaaatgaaggtgcattatctgggcaatagttgtatcatcatcagctaggggcaggatggagggaccatctttaactgtaattgggaccttgcttttgtgaacatgtcttgctactgggactctgccagcccattgtgtttcctgtgacgctagatcccagttcatggttgagcccttgcttagtggctggctctgaggtagggcccgaacactcaaggctgagtatgtatgtaggtgtgaactatttgtgtgactgttccaatcccatatagaactttctatagaagggcattttatttctttagtttttacagattctaaatatccattagatatgttaatttttagacctgtaaaaccactggtacaattttgttttattttgacacagggtttctctgtgtagctctttgtgtagctgtcttggaactcaatttgtagactatgttggcctcaaactcacagagatccacttgcctttacctcctgagtgctgagattaaaggcatgtgccaccacttacatagtgtgcatttttattctttcaagatgaatttttattttattttattttttaaagatttatttattttatgcatgtgagtacactgtagctgaacagatggttgtgagccttcatgtggttgttgggaattgaatttttaggacctctgctcgttctggttaactctcctcactcagtctctgcttgctctggcccaaagatttatttattattatacataagtacactgtagctgacttcagatgcaccaaaagagggtgtcatatctcattacgggtggttgtgagccaccatgggatttgaaatcagcacctttggaagagcagtcagtgctcttaacaactgagccatcttgccagcccctcaaaatgaatttttaaaaaatatatatgtatgcatgggtctatgtgtctgagccatgtgtatggcctgatctgcggaggccagaagagggcattagatcccctgtaactcaagtggttgtgagcttccctaacatgaatgctgggaacagaatttgggtccctctggaatgaaaagaataacaagtattcttaacctccagactattttttcagctcctccattcttatttctttgtttaatttgcttcttgacccaggtccctgtagtcctggctatcctggagcttgctgtataaaccactgtggccacaagctcccagagatgttcctgcctctccctcccatactggaactaaagctgttcatcatcacattcctttcaataagcgtttctttaataatataacttggaagccatatgaaataattatttaagctcccttaaactttgaaagtcctgttcagagagatgtgtgtgtgtctgcctcccatgaagtttatacacatgcacatgcgcacacatgtgaaagaggcatagtattgaaatgtatgattctgataggttctggcttttggaagagaaattattacagtgtatctggaagttggtcatctggagtgctaattgtgttcttgtacaaggtgcatcatccccagcaggaaatgtttggcccagacagggtttggtgggcatgattctttcctcttgtttgtttctttgtttgtttttaaagaagggacccactaagtagacctggatagcctggaacttgttaggtagactaggctggccttgaacttcctgagatctgtctgtctctaactcccaagtgctgggattaacaggcatgcgttctcttcgccacctgggcgcctcctgtcatgctctgggtaagttccatagaagaaaaagaagaggaggaggaggaagtagaaaagggggttctctccctctacttagtcctgactggaaacatagaacacctcacagccagggaagagcagtggagagacttggaaaagagaaatagttttgacgtctgctgaaaataaaagctggcaacacttaacaaaagctgactcctgtcccagatgacacagatagctcacgtgtgtcctgccatagtctgcttgtgtcatgtttgaagtacccacttcgaggtactgtgcctttaaactgctcgtcctaaaggaaaggagagaatggagttctggtagaagcacgccaacagtgccctttcattgttttaaggttagcaaaatatggttgccaagccatggaggcacactgtggagttgaggaaacaatctcttgagatgcgatttagcttgaaattgtgcacaagacagaaactatataattgaaaagggtacataggcttgtgacattggaacacactaggggacttaaaaaacattgaaaatagtatgttggttggattttggcgtgaattgtaagagtgaagttgtagcttccgtgcatgctgatagtgtactggccagaccacagatgtgcagaacatggctgggtgtggccttttgtgtctgatctcagctcccggcaggcagaggtaagatggatcgcagagttcaaggctaacctggtctatagagtgagagaatttgtctcaaaacaaacataaccaaaaattatgtttaaaagcttgcataattgtaagaataaatgtgtgcctaagagaaggttaggttatattcattgcgcagtgtcagaggcctgcaccgggtatggcatgcaagcaagcttcttggttggaagacatgagttcctagctatctgaaaatgtggctgtgtagactgcattcttccccagggatttcaagcttttctcataacccagtgtgaacttttccaaagatgacagacagggttgcagggctacagggatgtaggatgaggagagggtagactgaggcagccaaggaaatgattgttggcaggaaagctcccacctaagtgttcgtagcagctggctatgttggtgcacagtggtcatccaggatagcatgtgcgtgtctagtaggctgtatggataatttatgacgtagttctgtgggctgaagacagcaggcaggacactggggcacagtgccagcactgcttcaaacttgctggaatctcactgttgcgtttttatctagttcccaggtgataccaaggcctctagtctgggacattgcaaaccaccacggtagactaaacccctcctgttctcccaggaatgaaaataaaaaccaaagtgccaatcatttccatctaacactgtctttctagactttaaaccaccgtttatatgttggtaacaaattttgtaccaatattatgaagcacccattagttaatggagtacacaggtgcacatggtagcctgcacttttcactgttttaaggttaaggaaagtagtttattgagtacagtgcaggagggcagtgatgcagtagttagagcttgtatcatcagggcaatgggctgtaagcctgggagaagtcgaggtattattagtgtgtctccaggcatgggattgagactgcttgaaggagaacggtccagattgaccagtgtacagttctgcaaggtccgcttgagtccctgtcaaacttctactctgcagatggtagccatgctagctactcaaacctgtaccattgcaagacagttcctttttctcatttgcagaaaaagaaactannnnnnnnnnnnnnnnnnnnnnnnnnnnnnnnnnnnnnnnnnnnnnnnnnnnnnnnnnnnnnnnnnnnnnnnnnnnnnnnnnnnnnnnnnnnnnnnnnnnnnnnnnnnnnnnnnnnnnnnnnnnnnnnnnnnnnnnnnnnnnnnnnnnnnnnnnnnnnnnnnnnnnnnnnnnnnnnnnnnnnnnnnnnnnnnnnnnnnnnnnnnnnnnnnnnnnnnnnnnnnnnnnnnnnnnnnnnnnnnnnnnnnnnnnnnnnnnnnnnnnnnnnnnnnnnnnnnnnnnnnnnnnnnnnnnnnnnnnnnnnnnnnnnnnnnnnnnnnnnnnnnnnnnnnnnnnnnnnnnnnnnnnnnnnnnnnnnnnnnnnnnnnnnnnnnnnnnnnnnnnnnnnnnnnnnnnnnnnnnnnnnnnnnnnnnnnnnnnnnnnnnnnnnnnnnnnnnnnnnnnnnnnnnnnnnnnnnnnnnnnnnnnnnnnnnnnnnnnnnnnnnnnnnnnnnnnnnnnnnnnnnnnnnnnnnnnnnnnnnnnnnnnnnnnnnnnnnnnnnnnnnnnnnnnnnnnnnnnnnnnnnnnnnnnnnnnnnnnnnnnnnnnnnnnnnnnnnnnnnnnnnnnnnnnnnnnnnnnnnnnnnnnnnnnnnnnnnnnnnnnnnnnnnnnnnnnnnnnnnnnnnnnnnnnnnnnnnnnnnnnnnnnnnnnnnnnnnnnnnnnnnnnnnnnnnnnnnnnnnnnnnnnnnnnnnnnnnnnnnnnnnnnnnnnnnnnnnnnnnnnnnnnnnnnnnnnnnnnnnnnnnnnnnnnnnnnnnnnnnnnnnnnnnnnnnnnnnnnnnnnnnnnnnnnnnnnnnnnnnnnnnnnnnnnnnnnnnnnnnnnnnnnnnnnnnnnnnnnnnnnnnnnnnnnnnnnnnnnnnnnnnnnnnnnnnnnnnnnnnnnnnnnnnnnnnnnnnnnnnnnnnnnnnnnnnnnnnnnnnnnnnnnnnnnnnnnnnnnnnnnnnnnnnnnnnnnnnnnnnnnnnnnnatgtttaccgtctacattgtttgtgttttaagtcattgtttagaatgtaacgatccatgactaaacctcagaaatggggacttggttacagttcttctgtgacacaagctattccaaagcagtctgtgattttgatagtatctttgaatttattatttgttgttgagttctgctagtatcttggaattaagacccagtaccttggatcagttatgtaactaggttattagcaatggaaaatcagcagaaaaagcaagctttaaatataaaactcacattttcagatgggatcagattcccaagcagcccttaactgtatttacaattgccttttggtactcgagcgctctgccctctgggaagcctagaccctccacagtgggtttcagaacttagcaaagagaacatggtgtctgtgttacatggacacagctctggaacccagcacttggaaagcttaagcagaaagattattgtaagtttgaggccagcctgggctacctaattacagtttactctggccatgttgtgagacccttgattcagaaatcccaaatcatagtaaacaaaaacaacagctcagttgttgtcacatctttggactacagggataacagagaaaaaaacccaacagcaacaaaaatcaaaaacaagccttcaaactgtagatagtccttggaaaagacccagcatcgtcgtcatccacgtgcagtgtgtgcctgctctgtgtgcagtgtttctgagtgattggccaaagtaggattgacagcctcctcatccgtctcttcagggcagttagctccagtaggttaagggcagactctcaggtcacttgtctgggttactgtcagcagtagagctattccatgctggctgctctgtgctctaaggttgcccaggccacctcaggtgctcatgagttgctaagctagataaatcttatccctaagtagccatatgataggctgtatggtttgttgaattaatatcatagtgtaatggtagttatatttacatggtcaagagaccacttggtggcaagcaggccacagtgctctgtgagtttgtccatgaggatggacggacagatgaggagagctgggctgctgttgccatgcaggacagccagggcacgggactgcaggtgtgaatgtgccccctttgctcgctcgttggcattttgggggcatttttttggcttttttattttgaggaagggcgatggtcaaattttgctgtggcgtcttaggctggcctcagtctggccttatgtcccaggctgttgtcacacttgaggtcacgtgcccactgtggcatcacgtgtgggattttatagacagtgtggaaactgtcaagttccaaatggcaggtttgaaatatgtgcttcctagaaaaatagaaatctagattaaaatataaggaagaaagtgctgcaccccatggctagcaagctgatagcacctagttttgtatcccccaccttggcctggtgaggtggctcagcagctaaccgtacaagtcaggcaacttgaatttgatcccagatcctcataacttttgaaagttcttctctgagtgctacagggtagatgccaggcgcttagactcacacacatactgaatgccccctccccacacaaaaactttaacattttagatagacatcttacatctgtctgnnnnnnnnnnnnnnnnnnnnnnnnnnnnnnnnnnnnnnnnnnnnnnnnnnnnnnnnnnnnnnnnnnnnnnnnnnnnnnnnnnnnnnnnnnnnnnnnnnnnnnnnnnnnnnnnnnnnnnnnnnnnnnnnnnnnnnnnnnnnnnnnnnnnnnnnnnnnnnnnnnnnnnnnnnnnnnnnnnnnnnnnnnnnnnnnnnnnnnnnnnnnnnnnnnnnnnnnnnnnnnnnnnnnnnnnnnnnnnnnnnnnnnnnnnnnnnnnnnnnnnnnnnnnnnnnnnnnnnnnnnnnnnnnnnnnnnnnnnnnnnnnnnnnnnnnnnnnnnnnnnnnnnnnnnnnnnnnnnnnnnnnnnnnnnnnnnnnnnnnnnnnnnnnnnnnnnnnnnnnnnnnnnnnnnnnnnnnnnnnnnnnnnnnnnnnnnnnnnnnnnnnnnnnnnnnnnnnnnnnnnnnnnnnnnnnnnnnnnnnnnnnnnnnnnnnnnnnnnnnnnnnnnnnnnnnnnnnnnnnnnnnnnnnnnnnnnnnnnnnnnnnnnnnnnnnnnnnnnnnnnnnnnnnnnnnnnnnnnnnnnnnnnnnnnnnnnnnnnnnnnnnnnnnnnnnnnnnnnnnnnnnnnnnnnnnnnnnnnnnnnnnnnnnnnnnnnnnnnnnnnnnnnnnnnnnnnnnnnnnnnnnnnnnnnnnnnnnnnnnnnnnnnnnnnnnnnnnnnnnnnnnnnnnnnnnnnnnnnnnnnnnnnnnnnnnnnnnnnnnnnnnnnnnnnnnnnnnnnnnnnnnnnnnnnnnnnnnnnnnnnnnnnnnnnnnnnnnnnnnnnnnnnnnnnnnnnnnnnnnnnnnnnnnnnnnnnnnnnnnnnnnnnnnnnnnnnnnnnnnnnnnnnnnnnnnnnnnnnnnnnnnnnnnnnnnnnnnnnnnnnnnnnnnnnnnnnnnnnnnnnnnnnnnnnnnnnnnnnnnnnnnnnnnnnnnnnnnnnnnnnnnnnnnnnnnnnnnnnnnnnnnnnnnnnnnnnnnnnnnnnnnnnnnnnnnnnnnnnnnnnnnnnnnnnnnnnnnnnnnnnnnnnnnnnnnnnnnnnnnnnnnnnnnnnnnnnnnnnnnnnnnnnnnnnnnnnnnnnnnnnnnnnnnnnnnnnnnnnnnnnnnnnnnnnnnnnnnnnnnnnnnnnnnnnnnnnnnnnnnnnnnnnnnnnnnnnnnnnnnnnnnnnnnnnnnnnnnnnnnnnnnnnnnnnnnnnnnnnnnnnnnnnnnnnnnnnnnnnnnnnnnnnnnnnnnnnnnnnnnnnnnnnnnnnnnnnnnnnnnnnnnnnnnnnnnnnnnnnnnnnnnnnnnnnnnnnnnnnnnnnnnnnnnnnnnnnnnnnnnnnnnnnnnnnnnnnnnnnnnnnnnnnnnnnnnnnnnnnnnnnnnnnnnnnnnnnnnnnnnnnnnnnnnnnnnnnnnnnnnnnnnnnnnnnnnnnnnnnnnnnnnnnnnnnnnnnnnnnnnnnnnnnnnnnnnnnnnnnnnnnnnnnnnnnnnnnnnnnnnnnnnnnnnnnnnnnnnnnnnnnnnnnnnnnnnnnnnnnnnnnnnnnnnnnnnnnnnnnnnnnnnnnnnnnnnnnnnnnnnnnnnnnnnnnnnnnnnnnnnnnnnnnnnnnnnnnnnnnnnnnnnnnnnnnnnnnnnnnnnnnnnnnnnnnnnnnnnnnnnnnnnnnnnnnnnnnnnnnnnnnnnnnnnnnnnnnnnnnnnnnnnnnnnnnnnnnnnnnnnnnnnnnnnnnnnnnnnnnnnnnnnnnnnnnnnnnnnnnnnnnnnnnnnnnnnnnnnnnnnnnnnnnnnnnnnnnnnnnnnnnnnnnnnnnnnnnnnnnnnnnnnnnnnnnnnnnnnnnnnnnnnnnnnnnnnnnnnnnnnnnnnnnnnnnnnnnnnnnnnnnnnnnnnnnnnnnnnnnnnnnnnnnnnnnnnnnnnnnnnnnnnnnnnnnnnnnnnnnnnnnnnnnnnnnnnnnnnnnnnnnnnnnnnnnntcttgtttatgggtttctttcttcccaagagctcgtgggccttgttagcttaattcagtggttagctgttatgtactggagatttctcagtgggttttactcagggcaggacagacattcatctggctttaagacgtcagtggctctcctctatccccggcccttccctaagatcctgtcccgctggtccgtaccctgagatctcatgttcatgtctcggtggttaagagctgtgcatgggaaaggagccctggtcctctggaaccctgacagttcttgcagctgctgagtcacccctctagcctacatacatttgaaacttttgttttcatagtttaggtgttttggagcttcaccattaccgaagcttctaaaattaagaaaaaataattataaaactggagattattacatttggaatgtcagtcatagtttaaagtatagaatgttcacaataggaattataatttgctagactatagtcagtttgttgctgtattaaggaatatatgaataggcttgtttttacataatagaactttgcattttaaatacttaaactcttacttgtgtacatagacttttttttagatttattttatttatgagtgctctatgtacacctgcactgcagaagagggcatcagatcccattacagatggttgtgagccaccatgtggttgctgggatttgagttcaggacctctagaagaccaggccgtgctcttaaccactgagccatctctccagccccatgaacataggcttttgaacagcagcatttaaactgtagctaaagtgcattagtctgaatctcatcaagtcaaaaaaactgcagcattttgagggaacattgagtataatgaattgagtatagcgaattgaagtcgagatattttgaatgaaaaggactctggtgtgtccgagtggcagaggcatgcagaagccggtttcctgtggctgatggtgagctgtgtgctcatggcggaagggtctctaggggggcacagtattttgtcctgtggagtgttggcaaagcttgttctttcatattgatctctcacaaagagctggtgtggtgcacgtggtcctgggcttgtgatgacactgggtggataggttgcagttcccagcggtgaaagctcttggccttctgtcaactttatagtcagtcagactcagattcactgaacagaaagtgcaagaagaccttgtcccagtttttgaaacatgtgttggtttgcttttaattgtttttataaaacactagccaaaagcaacttggaggaaagggtttatttcagcttatagacttcagtatgccattgaagggaggcagggggcgtggaggaaacacctactggcttgctcttcatggcttgtttaactggcttgttcatagtacccaggaccaccacccacagtgaggtgggtcacataactcatcaaccaggaaaacaccacaggcttggcttcaagcctaatggacagaacactggctcccataggctcgcacatatggcctcattggacgaagtatgtcaccaggggtggtcttacttagccttgtccgcctgcctgtctgcctgccttgtctgtctgcctgcctgagtctacccacctgtctgcctgccttgtctatctgtctccctgcctacgtccacccacctgtctgcctgccttgtctgcctgccttgtctgtctgcctgcctgcctgcctgagtctacccacctgtcctgcttcacatcaggatgtagttccttcctctacttgccctgcatgccactgtgccccgtgctgcgatgatcatggactgttctttgaaagtgtaagcatgccccagttaaactagaagagctggccgtggtcatagtgtctcttcacagcaataaaacagtgactaaggcctgggcattttctcaattgcacttctctattttgtgttgacagaaaatcaccccccttccaaaccccctcagacagggtttcttgtgtagccctgactgtcttggaacttactttgtagatcaagctagccttcaactccgagatctgcctgcctctgcttcgtgagtgctgatacagaaaggtaacctgaaaggtaacctgttcgagtagatggtgctcccttcctggttctctgggtagctaaagggagtgctgtgacctgctgagggctctggtggcccgtctaccctttagagcttgctgcaattctccctttgtgctggtgagggaaggctgtgctcaggaagggaacactattactaaaaagctgcctgagtagttagttagctgttggctgctgggcactgctgcctgttgctgtagttagttagctgttggctgctgggcactgctgcctgttgctgtagttagttagctgttggctgctgggcactgctgcctgttgctgtagttagctgttggctgctgggcactgctgcctgttgctgtagttagttagctgttggctgctgggcactgctgtctgtagctgtagttagttagctgttggctgctgggcactgctgtctgtagctgtagttagttagctgttggctgctgggcactgctgtctgtagctgtagttagttagctgttggctgctgggcattgctgcctgtagctgtagttagttagctgttggctgctgggcactgctgcctgttgctgtagttagttagctgttggctgctgggcactgctgcctatagctagctagcttttgtttttttgtttttgtttttgttttttgagacagggtttctctgtatagccctggctgtcctggaactcattttgtagaccaggctggcctggaactcagaaatccacctgcctctgcctcccaagtgctgggattaaaggcgtgcaccaccacgccccagcgtgttagctagcttttgctacgttttgtgttcttctttcttctaccctttcaatcccgtaacactagagaaacataaaagagaaaagaggatagagaggaaaggaaagagatcccttgacatagttaggttttaaaatggaggggctttatggttcgactacttcctgctgatgggggcttctcgagtttcttggggcaggtttgatctttgctgtcagggtaggtaatttcttctgtttgtttcttctttgagcacatctatttaagaaacttcaaccaacaacctttggggctctagcatttatataccctttgaaaagtctccagaattccaaatgccatctagtcacactatcacagaagctagccacagttggcagaatcacgactcagagcatgaggcaaatcatagtcagctgctgtgggaaatctgaagcagcccatattcccacacctaggattaaaatgaaaacatggtcctgtaatatttctatatttttaaaaaggaaccaagattcccaaatcttcactacagctgaagatatcttacccatatctggacaggacaaggtgtgcctatcagggatctggataggagagaagccagggcttggagccacttcaggaccacaggagccagaaggcaaaatctcttgcagtgttgcctatgtagcatcctccgttgacaacagtgtgccagctgagatgctgaaatatttatagagccagattcattttcccatcgtaggcaaacagggtgacttttgagctgaaaggcaagcaagggtgattggtaaataaggagacagctccttagctccacagctggttcacagctcttcaatttccaggaagtcaggacttgctaggacggcacagtttgcgttcaagaaaggacgtgttctggcccttgtcagttgtaaggccacaagaaccaaccttttgctgttcctccagctctccttagatgccagaacacatgaatagccaggaagccatgaataggctgccagttactgccctggtgtttttattgtctgtctgtgagattgcacctgatttgttgagttacctagtaagtaagtgagtgtgtgtgtgtgtgtgtgtagagagagagagagagagagagaacacgcttgtgtgtgtgttgggggggtgagagagtgatcgagcgtgtgtgcatgcgtatgcatgtgtgtgggggagagggagatattgagcgcttgcatgtgtaagcacatgcacatttgctccaggcaagcgcattctctaagcgacttcccagtcctctgtttcccgttttgaagcagggtctcactgagttgttccccaggtgtctgatgctgcagtcctcctgtttccgtctctccagtaacagacattagaggctttgccactaggcccagctttttattttttattattaacacaactaacgattttacttagtggaaacttttgtatatttaaaatttttcatttttatgaggaaaacaaagttacaattttatgactttaacaagaagttttttcctaatcatatattgtcaaaatagatgaatgttaaatgttcttaaaaaaggaaaacaaagtaaaatttgcagtttttatatttcatttccatctttctaaaaagtgttttacatgtatgtgttggggtgtttgccttcacatctgtgcacttgtgtgtgtgcgcaccacgtgtatacctggtgctcaggacgtcagaagaggggctcagatcccctggaactagtcagtaatgactgaatcacccgacccggtgctggggacagaacttgcatcgtgtgtgagagcaccaagtgtccctaactgctgatccgcagctcagtcctcccccctgctccctcctgtctaccgagtctttggagggagggctgttagaagccagctggggcagcatcgcaaggctccttgctgctggagcactgacagcacgcatgctctcttggtgctggctgctgtttgcttgtttttgataatatgttatcatactgaaaaatatatttgttgggagttgagtatttagctcagtggtagagggttttcctagcaagcacaaggccctgggttcggtcttcagctctgaaaaaattttaaaaaaggacaaaaaaaatatttgttgacaaaaatttcacaaacttttgtcttttttttttgttgttcttgttgtttgagcctggctcttgagtagctcaagcttgcttggaatttaccatttaactgagggggtggggccttgaactcaaagtcctcctgtcttggtctctaatatgctagaattacagtatatcatcatgtttggctagaacaaatacagtcagctgtctttgccattgtcattaaataaatgtcctgctgtcttggctcctgactgtaaccctagcccttgggggccaagttggcaggataaggccaagttccctaaaagagaagcaaaaaaacctgaataggttataaatacctgaacaaccaatggcttgctgtggtatgatgcaggagtgtggtgttatttctactcgtggtggctttatgtgacaagactgggaatttccacagcctgtcaccttttgcctttgttggcagggcacctgcagttatttatgaaaaaggactctcagtgagtccctgttagtcctgcctcatccaccttaccttgaaccaagtgagagcagcttttggatggtgatttcgttgtgcctttccttgtattgcacacagttgcaaaaatagcccagggattaaaacaattccatgcttgcttttaagtgctgttgttaagagtagtgactaagtggtcattgccctgtttgcacacagagagaccaaagggtaagtctctgcttgggaaatctacaccatccacactggtcgaacccacataggaaatctcaaagtgtcacgtcagtgttgttagaaaatgaagggactttacaagagtcaaactgatggtggtttcatgggcatttctcattgtctttcttctgggccccacttttgattgttgccccccttttcacctaagttctgtcagggcaaagagcaggatctctggacacaactggacattgcttgatttttaccccccttgctgtcacttggtgttttgagtaagtttttttaaaagcagtcttcgtcctttcccctgcaggttttcctcagtggacacctgtactttctgcagatttgagcagcagctcagctccagcgctgccacgttctagaactctagcgaggcattcacatgcttcatatctttatttttggtttctgtttctgttttgttgttttatacttccagaccttgctatttcctcagagaagtcagcacatccgggtgaatcttgggaaggagaaatacaagtagaggcgtctttgtctgtcttttgttaagaatgccaggctggggatcagtcagcatgtgccacaggtgactaggaacacagctggatcacccgaagtactggtactgtttctggcagaaacaccctctgcacgcatgtgtttgagcaggctgttggggtgtaccaataggaccatggcagaaaggtcagcagagggaacaagtaccatggtcatacagagtcctggtctgagtttaatccgggtttgctgagaggagaggtttgcagggctgtaagaaggggtgaggcgactcagtaaaggactgttgcctttataagggagcagataggaaggcaatttgaaagcctgtgaactggaaagagcagtgtataaacgcttctttccccttcttttttattttcaagacagtttctctgtgtagccctggctgttctggaactcattctgtagaagaggttggcctcagagatccctcctgcctctgcctcctgagtggtgggattgaaggcctgtgcccccactgcctgccttctcttcctttcttttgagacaacttcttatgtaacttagatagagctattgctatgaagagacatcatgaccaaggcacctcttaaagaatggaaacaattcaattggggctggcttacagtttcaggttcagtccattgtcatggtgggaagcatggcagcatccaggcagtcacagtgctggagaaggagctgagagttctacatcttaatccacaggcagctgaaggagcctggcttccaggcagcctggaggacactaatctgcactagacttagcttgagcatagaacctcaaagcccatccccgcagcgatacacttcctctaccatcatcactccctataggccagaactattcaaactgccacagatggcctccagtcgaagcctctcaggtgcgagggtcgtttctaagctgtccattagtccatgggccagatttgcttttcttacatagagtaagtctctggcgattgaattgtacccaatggaggaccactattttacgtgtgtgtgtgtgtgtgtgtgtatgcaagtttttttatatgtgtgtgtgtgtgtatatatatatatatatatatatatatatatatgaatgaaattatactgtgtccagtattttgtcagacttcgcaggtaaagtttgtttgctgctcgctgtccacagtgctgcatccccaggtagcactgcactccatcttcctaaggccctgttacttctgatcatgtctgtggttgcccatcctctcaaagacaggccgccttagagttcacgttggccttcagcaagtaaccccatcagttaagaagcatgtagttaacaaaacaaaacgtgagtttatcttatcagccaaatgctttaaatgaggctgctgtactctggagagtaatactgacgaagcagctagggaagggaaggacaaggtgctagtgccaagacggaagtgtttggaggatgctcaggatgcagctcaggatgcgaggtccagtgtcatggggtgtccttccctgtcagttctggagtttgtatgaattctctgatgtcattgcctgtaacctcaagttattccttaatgtaaaatgtctgcttggtactttttgtnnnnnnnnnnnnnnnnnnnnnnnnnnnnnnnnnnnnnnnnnnnnnnnnnnnnnnnnnnnnnnnnnnnnnnnnnnnnnnnnnnnnnnnnnnnnnnnnnnnnnnnnnnnnnnnnnnnnnnnnnnnnnnnnnnnnnnnnnnnnnnnnnnnnnnnnnnnnnnnnnnnnnnnnnnnnnnnnnnnnnnnnnnnnnnnnnnnnnnnnnnnnnnnnnnnnnnnnnnnnnnnnnnnnnnnnnnnnnnnnnnnnnnnnnnnnnnnnnnnnnnnnnnnnnnnnnnnnnnnnnnnnnnnnnnnnnnnnnnnnnnnnnnnnnnnnnnnnnnnnnnnnnnnnnnnnnnnnnnnnnnnnnnnnnnnnnnnnnnnnnnnnnnnnnnnnnnnnnnnnnnnnnnnnnnnnnnnnnnnnnnnnnnnnnnnnnnntgtccagttgccatgtttaggagtgactaaaaattctgactgctgttaagggtttggagaggacttccaggttcacatttgaaatggagaaggtggaaacagaactggtgactcagaagccagctggctcatttacataaccatttggcaacctttagaaagggaaggaaggcctggaagctagcccagaaagatctgagtacgaagggccaacctgcaggtatcactcttgtttcttgtaggttgagaatggttatgacaacttcaacttcaataaaggcagaaggttaaataaaccatttgaagacaaatgccaaagagggattataaagtttcttagtatttatataaaaaatgaaatatcaaaaagttgggggctggtgagatggctcagtgggtaagagcacccgactgctcttccgaaggtccagagttcaaatcccagcaaccacatggtggctcacaaccatctgtaatgaaatctgacgccctcttctggtgtgtctgaagacagctacagtgtacttacatgtaataaataaataaatctttaaaaaaaaaaaaaaagttgggtacatatacaagggatttttgtcttccacttagctggtcctaactcttaaaagctgtaaggaatgaagacttgttggagagtggctggttctttgagaaggataacatcacactggacagaagtaccatgcaggctctctaaggagtgctctgtctttaggagtcaaaacgacagattctttttttttttttttttttttttttttttatttattattatatgtaagtacattgtagctgtcttcagacacaccagaagagggagtcagatcttgttacggatggttgtgagccaccatgtggttgctgggatttgaactctggacctttggaagaacagtcgggtgctcttacccactgagccatctcaccagccccaaaacgacagattcttaaaacacatcaagtcttgctcagattagagctgggtggtaggcacctgggtctctggaaacattaaagtgattgtaactaaaagctgctcttcccagatcccagaacatgaactgttcatggcagagtacaggccagtgtttatgggcaattttgtaccagattgccatttccaaggtaagagctggttggtcagcactgtaggtgtctagggaaccctgtgacacaggtgtcgttatttctatcttggagattgagaaggagtgatttgacaggtgggagggcatctttgggaagcggccaagttaacacccccagttcccagcttctgtgtattttttctggtgctcagaattgagcttagtggcctcacccatgttaggtaagtgccccaccaccaagccaccttctctacttgcagttcccagtctccacgcttcttatagtctcagagttcactagcacatttccgttcaggttcatttttagataagtgaggcttttaaaactcattctggccaggcgtggtggcacacgcctttaatcccagcgcttgggaggcagaggtaggtggatttctgagttcgaggccagcctggtctacagagtgagttccaggacagccagggctacacagagaaaccctgtctcaaaaaacaaacaaacataaaaacctcattctggaaacactagtaccattcacagcatggtctttgaaataccatttccgggctggagaagaaggctcagcagttaagggcacttgttgctcttcctggaggtcaaagttcatgtctcagcacccatgtcaggtgtttcacaccatctgtaactcaagctgcaggcaatctgacatcttcttttgacctgtgggctaaagtatacacactgtacccatgtatatacacacaaatttaattaaaaaaaaaaaaagaaaaatgtttcataatgttttagcgttgggaaatggctccatagataattccttgctgtgcaagccatgaggactccactctaacccttctagtccttcattaaaagctgggtgtggtggcattatgtttcagggtctgggtagcagggacagcgggatcctggagcttgttggccagatgtctaaccatccggtgacgtctgtgtttggtgagagagcccatctgaagaagagaatggtaacctgatgtcacctctgtcttctgtacaggtgcacaagggcacacacctgcactgtgcacacgcgggctgtacgctctacacacaaaatagaaaaagtatattttagtttttaagcagttaacatgaaacaccttgctacacagtgggcttttatagtaacttatctgcacatggatggtggcggcggctcatgttcttttatcccatggtggcagaggcaggcataattttgagtttgaggccagcctgctctacagaattccaggacagccagggctacacagagaaaccttgattgaaaaaccaaaaccaaaaatatttaaaaacaaaggaagaagagttctggggctcaccgaagattgtctgctgtgataaatgatgggcgggaggtagttttgatgaaagtgatccagagtctaaataaagatgggcgacaggaagaaagcagcacaggtgagagagagggtggcagagagggtgcaggcagtgttggtctggcccaggccctgacaaagggacgctgtcaacatctgtgggtgcctgcgggcgccagcgggctcagtgaaccagcaggcttgtccgcttgcacccgatgtttcctagtgagaaggagctgtgttcctttgtggggtgtgctaacccttgggcactgttgttagttactgttgtgactctaggaagccccttaggcatagttgtgggtatttctcgtggtccagggaagagcatggtttgggtctggcctgggtgactgtgatgtgtgcccaggtttggggggaggggggttaggagatgcctttcctgctctgtgctagaagcgagcatactgaagagcagcacagccctgtgctcgagacacaatccggttccaggattctgtcagcaaataagctccggtagaacacggcggtgctttgatgcggggatgctgtcccacctaactaatcagagcgtttaaggaaatgcaacggtagagattgagcttttctgtttgctttatttatttttttactatggtactaatgtttcagtttttagagtatggtgtgaaatccgtttgctttcaacattatcgcattctaggattctgttgataatggtaaatattttgacttgggttgctgagggtggcaagaggagctgggtggtgatgaacgactagaactgtgtcagtgtgctgaggacagtgctcattagctgtcagaaggtcacaggaagagtgactgggtggttttagtgcagactgcatgcatactgtgccgtaagtggtttaattgcctaaaaccgtcactcaaagctcccacaagccacagttaaggagaatagtatttgtggcagataacatttaagacacagcccttctcgtttgtacagtgtccctggtgtcgcaaagcagcttcattcagcaacagataacctctccactggggccctgttgagaggcctggagagaagcagagcgctgcaatttgtaaaagtcctgggaagaacttccttcagctagataactaaaaagagattggttgcacatcgtgctggattctctgtgggccggggagccctccagcacagccagaatgtaagggtttgcctaggtgccttgtgtgctggtgcaggcttgtaatgccagcacttgaaacagttgtcctgagtttgagacccactggtgagtccctgccttttaaacagagttttatatctaaaaggaaggctcagttaacactttactaagtcatttccccagcacatcatataaacaataatgaatggggccaggtctggtggtgtatacctttaatcccagtacttgggaggcagagggagcccagatctttgtgagttcaaggtcagtttgagtgttggaattaaagctagtggtattgaatttcaacagcagatttttagggtcttaaaaaaaattctttcatctaagtttaatgatactttatttttgctaaaactccgttagtgtgactctcgctgtagttgctataatctgtttcatagttcatttttaagtgtttgtttgcatgcatggtgtatgcatatatatggtcataagaagtcagaggaagcttttgttttgttttgtttctgtgtagccctgcctgtcctggaactcactctgtagaccaggctggcctcgaactcagaaatccacctgcctctgcctcccaagtgctgggattaaaggcgagtgccaccactgcctggctagtcagaggaaactttatggacttagtcctgcccttttacctgtgtatggtttctgggaatggaacccagcctgacaggcttgcaagcaagcatcttccccactgcagctatgatggtctttaaaacaatcactaaactcactcttcaggcaaaactgtgtacagattgcacattttaaaatccataaagtcaggctggagagggcacagtggttaagagcactgactgctcttccagaggtcctgagttcagttcccagcaaccacacagtggctcacaaccatctgtaatggaatctgatgccctcttctggtgtgtctgaaaacagctacagtgtattcatacacagaaaataaataaatttttaaaaaaattcataaagtttctcagaaagtcattaaagttagtgaccttggcatgtcttgaaacacaaggtggttaatcgggaaaccttccgtagaacactcagtggcctttccgttgggttgggaagtgtagctagtggacttctgctctctgcctctgcagtcagccctcaggctgctgccgtggatttgcagttagtccatagctaagcaggtaatcagcttctgcagatatatataggcctctctttgctgcggtgtggggcgcactgcatgtggggaggccagaggttgtctgtggagttgcttctgaagggcggaaacgagcttcccaaggctgaacgttcagagccatgttgccgtccttcgttaagttagttagttagttactctttggtgtttgaagctgtgagttctttatattgtggcctgttagtcccttcttagattttctccagtgctgtgggctggactcccacagggtcactgcttcctctgtgtgcagaggccttctcctcagtgctcttgggccttgctgttacttttggagcagtgacggccattttcagaaagtttgctctgtactaatgttttaaggtggctttgtcccctagtagtttcagagtagcagagttttggcgtttggcccagctttgatttagcttttaggcatggcacgagatagagaggtagatgggcgtcttcatctatttttgagtaggtgcacggttggcagtgggcctgctccaaggctgcgtggctcctcactgcgcagcactgacactgcaggctggcacatttctgcttcagtcagcactggctttgaaaacactgccccttcctcgtggaatggtctgggtgccctttccagattgtttgcccgtggatttggttttttctgggcgcctcacttcagcctctgtcagtgggcttgttattatagcagcactactctgattaagtttttgtaaatctgtgataatatttcaagcggaggagtgacttcccagcttagttcttttaatggctctttttgctgtttagagtccttggaggccataccagcactcagatgagccttctgtttctagagagcctgtcattgggttttgatggcaaatgtgctgagcctaggctagcatcgaggtctgattataggtagcattttctgttttccgtagcaacctttatagttttatttgtgagtctttcgctgtttgagtttggtcatcacttcggaatcttatctttataaatactttgtaaacaaaacttcctatttttctcttcagatacttggatctccacattggttttgtatgttgactttgtatcctactttattgaaatcttagttctgatattttgtgtgccgtctctgtgtgtgggagtgggttacagggagatgccctgggtggtcctttatcccgtctgtctatgttggccaccaaactcagggttttgtaataaactgaaagtgcagagatgtagccacagcctttccaaggttttctgcatcactgggaagatacatttatgttgccttgtttttctgtgagatttacaaaatgtccctttctcttctgtttgctgggtcctccgctagctatctgggggcctgattcttctctctcctgatcttcaggaaaagtgcttggacttttccagtgagtgtgatgtgtgttgtgtttgggtgtggcttgtagtgtgctgaggtgatttctagtcctgttcccgagcttttcaattgaatgtgagaatgtgtggtcctttgtgaagggttttggtctgagtcagtttgtgcacccaagtgcaggtcctgctcaggccggaagagggagggatcaggtcccctggagccaccatatccgggagttggggactgaattcaagtcctctgaaaaagagtagtggctctccagccctgtcattttttacacagtggattgattttgtgcactgtattttaagcttcaccaccactacatgggattatttctggaatacgggaatgactcaatattgaaaactgatcatggcagcatgtcccacgagcataaagagtgacagacagtgatcagttcagctgacacagaaacacttccaagcgcccagtgccctgttctgacaggaacactcagttaactcagagtagaaggaaactacctcaacagagttgaagcctcatttggaagatccacagtgagtgtctcccttaatgatgaacctgtactgtcaggttgtatcaacttgacacaagcttgagtcatcagaggaggaggagtctccttgaggaaatgccaccatgagattcagctgtagggcattttctcagttagtgatcagtgggggagggcccagccttttgtgggtggtgccatccctgggctggtggtcctgggttctgtaagaaagcaggctgagccatccacgaggatgcagggcagtaaggagtgcccctccttggcccttgtatcagctcctgactccaggatcctgccctgagttcctgtcctggcttccttcgatggtaatgccagggaagtgtaagccgaattaaccctttcctcccaacttgcttgttggtcttggtgtttcaccacagcagtagaatccctaattaagcagctaaagagtaggaataggatgtctacagtcacctcagattttatctcttaaaaaataattcatagataggatgtctacagtcacctcagattttatctcttaaaaaataattcatagactgggtggtgacaattgtctttagtcccagcactgaagagctagaaacaagcaggcagatctcagtgagtccaaggcccttcgagtctatttactgagttccaggagagctacagaaagaaactgtgcctcagaaaagaaaaccaaaacaaacaaaattcatagagatttttgtttcattaaagtagccgtgtacccaacaggaaataaactcaatagtcaaggaatgtatgccctgttctttgacattgcctgtctttctacttcatcataatgttttttttaacttttttaaaaaagatttatttattatatgtaagtacaatgtagctgtcttcagacactccagaagagtgcatcagatttcgttacagatggttgtgagatgccatgtggttgctgggatttgaatcaggacctttggaagagcagtcagtgctcttaacccctgagccatttctccagtccctcatcgtaatgttttaatgaatgtatgtgcttgtcccgcagcctgtgtctggagggcagaggacagtttgtagggatcagtattgtccagtgtccaactgccttgccacctcatcttacttttcttttgcctaagtgacaacccctccccttctccctccccaatgtatagatatttggtcttgatttaaagtgatgttttctctcctaaaaaggactggttttgtgtctctgattaattagcttactctggttgacttgtctctgtatggttcctactacctagttcttatgtttttttttttttatagttacagtttagtgtaatatgaatgaatgtattctttacacttaaaaatccagctcagagaaggtgtctattaaagactcaagcaagaataaatgtgtgttctggagaaacaaactaatgtgtctggacagaggcccctagggggacagtctgcagggtcctgggctgtattcttggccattctgtcccgtgctcccttcccgagtggtagagcgtgttggagcgtgtttgctgtcctgctgctttcatactttggtcttagcttgtgatgcatgagtgtgtagggggtttttttgttttgttttttgttttttgttttttttagtttttgtttttatttttttttttttccaagacagggtttctctgtgtagccctggctgtcctggaactcactttgtagaccatgctggcctcgaactcagaaatttccctgcctctgcctcccaagtactgtgattaaaggcgtgcgccaccactgactggccatgagtgtgtttatatgtgtgcactcacacagttgtgggcgtcagttctctccttccaccgtgggttctggagacccaggttgtcagcaagcacctttgcctgttcacccatcttgccttctagttctccttagtatactatttatcctcttcacctttgtccaggttccctgcaggtaccacacatgagcctttctttagctgagtcttactgctttaacacatctgaggacagcactgcttcgttgagctttttctgttttaggattttagtctggccctaaaaccttgttcttctacctcacatcattctgactgtggagtgtcctgtccagttcctgccctgtgcaccccaccctccctccacctctgttggttccagcctaggtggcttgctctcctgtgtcaggactgtgctccatgatgctctttgttgtgtgtccccaagacgctgctctcctttccctgatgactggcaggaaggtcattgcttgctaagtagtcactgttggacctgcctggaaacctccagtgacgttctcgcctttggacattcttgctacttctccacatagccccctccacagtcggctttttctaggtgtttcgtgacttgtgaatcagttgtgccgctgatacaccctttccttctgtctcactgctctcaacaaccaatcagaattctatacactgctggattgcttctcttactctgacctgaggaagaagactttgggaaccaaatactgactactggtgatggaatgagcatcttcatgggaaagggaagcagctttgctctagagcagtgccttagggatgcgtttgttgtgtgcagatgtacaggcctggttcttgcctccctggtggatagggtgtggccatgttgagtattgccagcctggcaggctgctagtttctgtatcactaaggacttgatgaataggttaggatggggcagagccctgatgttcttaagctggtctctatcatacacatcaaaatgggtgtcattttgggcatcgtaggaaactgacttggtggtgggaatggggaaagcagcagaaagttatggtatggtagttgtggagagccaggggtgggtgactcagctcttctctgggcctgctcatgtgatgtctgtttatcctcagggtgagttctctaggagtcgcattacacaggaggcaatgttgacttagcctgctcatccatggtctaaatataacttgtgtgggtattgttttgtttttatattttgtttagttttgcaagatggaagtcatattggagacttattgagtgctttcctttctaaatgattgtatcttcctcctatacactctggctctactgttagtattgtggtgggatatttaaatacaaagagcagtggaagatagcggtcggtcgtattctctaaaggcaattcgggaggtaccttgtcatgtgttttctactcatggccttttattgcaatcactggtgcaaccttgtggagaagtgcacgtacgttgttctgactgtccttgctactgagtcctgtgagtctcgggttctcccctgtgcagagaatttctgagccatgcgctgagtgtttagcgtgtccaccatgatcacaacgcctttgagggcaggagctctgagcagcccgagttcataatcacacttgcatattcgtctgggaaacagggagtctttgtcgtggttgacacttctttttgacacttgggtgcccctgctctcggaggttcagcacaagtgcccccctaacctgagccctgtatcatcctgaagggcagagggtgcctggattccttaagaaggaagcgcagtgtcctggctgcctggcgcttggctgcctgtgcttgactgcttgcttccaccacgcacagtgcctggtgctgatgagaagacaacacaccaagaactgcgcgcttgcatttccagagttgttgttgtcctacttagaggcaggaggcgctttatgtgcccgtgcctggcctggaactcactacgtaccccaggctggccttggattcacagagatctacctgcttttgcctccttagatctgggattagaggtgtgtgtcactacacccagttcatttcctgttttagaagatggttagtcaaagctgaggagctgtgtcccagcatcacatggttagactacccgctgtgacttctgtggcagcactttctagttaatgcagtccttaggagtttcgtgctagcctagaatggcatttttattgcatgtcttgggattgatttcacataagtgggacctgacttggaccccatttgaaaggtgcctctggtttagatgtggtcccttatatactcctttcttaatcaatggatcacatattggtcctattggattattcaaatatctgaccctggggaaataagatggcggctcagtagataatgtgcttgctgccaagcctgatatcttatgctcacacccacatggtagacggaacgctgacagccacagtttacctctgacttcctgcgtgctgtgatgtacacaggggcacacatgtaatacatacaaagttttttaaaggttctaaaaaaatgtctaaggttcaacattgtgcccacacacacaaatacacacacacacacacatattttaagattaactatctcaccagacatgggcgtgcacatgtttaatccctgtactcagaggcagaggcaggtgaatctctctaaatttgaagccagcctggtgagttccaggatagcccgggctgcatggtgatatccccgactcaaaaccaaaaccaaaccaaaacaaacacttaagaactgtagaacgttccatttgagcttggtgaaaatgtgaattttgtctgtagcctgcatccctagaaacgcattttcaggtcaaggagttgagtgctgtgaaggctgggtgttacccagcagcccttacaagtcagcagtgcactgtccagtcctactgtgagcgttctcatgcacaacgtattgggcttcgtccacttggtattatttacttaaggtgataaattgccttaaaatgagaaatgatgttttatttccaagttacatttgaagtgcagcgggtgctctctgagtgctttctgtcatcgttggttttgtcacctacatttgttgttttcattataaaagtagaaaatccaagccgggcaatggtggcgcacgcctttgattgaagcacttaggaggccgaggcaggtggatctctgagtttgaggccagcctgggctatacagagagactgtttcaggggagggagtagaaatccatcttagtcccttgtgtgggttccatgggtctgtgtctgaagttattgtaactcatatgcagttcccctcttctcatctgtcagtggaattcaccccaaaaccttagattctgtttgtcaaaatcttaattaccacacttaaaagttctgtgtaagtgactgaggacttgtgtggtcggcctgtcttcagcttgcacttggttagcagttatctaggcgagcaccagagttgagtgaaacgtgaagctcaggaaagtctgagcagtcctctgtaaggacaggactagggtccctggccacaggaaatacgtctgcgcagcccgtcttggaggatggagtcattgttatggttctgatgtgtagcacctcctcttttctgtacgatagcgccaggtactaagtctgagggccttgtaggtgctaggcagttgttctgaccaccacatgtacgcagtgacacaggaccacatttgggaggagactcagaccctacagtaatgaaacctgattgaaaaatcaaaaggatgttttggagatggcgtgagaggtctggtggtgaagagcaggtattactcttgcatggcatccaaggttcagtgcccaggacccatactgggtggtgtaccacgtccataactctagctccagggactccaacaccctctctagactctgcagttaccagactcacacaagcatataccacacacgggcacatcctcacacagtgaacataaaaagactattgaaaagggcgcgctgaagaacctggattaatcatcccagggaggacgtgaataaacaagggttacagaggcttcctctcctgcttctgctcagagcacagcaggtgcccagggagacacatgtgggcagagttcctttaccctgcgccattgacaaacaccaccatgttactgagggtgcagtaccttatgttgaaacagaacagttgtgcgcctgttccagacattgctttgtatatgggtgtatgcctgtaccagacttgtgtgtgtgtgtgtgtgtgtgtgtgtgtgtgtgtgcgcgcgcacgcgtgtgcctgcctttactagctcttatgcatgcagctgtttgtctctgtgtgcctacaccaggtccttgatctctgtgtgtttgtgtgctttgtgtttatgtgcctgcaccgtgctttccacttacacaaagctgccgtgggtgcagtaggaattggttctttacatgcattcagtgtaaatatttaataaggagaagcatttgggttttttaaaagatatgtttagagaagaagcctaagctacaggaaaataaaatcgttattttattttggttgttgtcataagaagtatgtggtgctgtgacagggactggtggctggtaccaccaggaaattacgctgagatgtacccctaggaaattacgctgtgcaatggagggagccaagtggatatggagatgggcagatagacagaacagagaggacactaagagaaagagctggggtggcctgcagtcctttttatcaaccacatatacctggcacacctggtggtgctggcaggtgacatgaaaagcacattaaaaacaacatagacaggacagttcctttggctagccatgtgacattactactgaataaaaaaacgcctcgggcccgaatgctaattaatgttcttctcttccgttggctttgtgtggtctttgttggccactgtgttgaagacattattaaaattttgactggtcagtctctgtggctgtcaatatctttccagcatggtccatgaaaaggcagtgggcttcttttctgttgtggcccagcaggtgtgagagcagtgtgctggcagagtgtgatgccgaacaggaaggtctagtgcttacacatggcatctgcggcttgagacagcctttgctgtttgtccaggctgccctcaaacttgcatctgttttccctctaccctctgtgcgggatttaaggtctcactaccaggccggatttgatactatagttcaaacgtgtgaagagacatttgttatcagtattagccaaagttgatatccacatgtatttttaaaaagttgatatagtcaagccattcagtgtggtcataaaaaagaatttttggtaagataaaaagtaaacctgaatcagtttgttcagttattaactacttaatattcatgactgggtaactgccccgttgttcagtttgtagctagacttaatagaatttgaataaggaaagaacttaaggtgattctcggccttctgtctcttgtggaacttgctcgggagatggcagctgtgttggagcattcattgcccaacaccctcgggcctccactcaccacccccccaaaacatgcgcacatgcacgcatgcgcttgcgcacacacatgcatgaggttgatgaagttccaccaggccctttgcactcctcatctgatataactgtatctagatttgggttgctgatagctctgtcagtgggcatacactacttctgcctttagttgctgaaaactatgataaagttaaaacgttaaaacttgctacagaccacagtgcataccacttctgcaaacttaaaagtattggatttgagttgctgtgtcatttttttaaaaatatgctgttgttttgccattctctgacagaccccttatccctctggacagaatgcaggtccagccacattggtctatcctcaagcccctcagacaatgaactcacaacctcaggcccggtctccggtaagtaagcagaggtgggtctcgcctctgcacggctgctgtgatcttttagtgaatgctcactttgttctagggaagatttagcatcaccatcactgccaccacactgtccctgctgtgactggttagcatttgcattgcagcaacttagatccagggctcatgtccatttctgagggaagagaaggtagagctgttccacgcacttccttccacacagtctggcactttcagaacttcctcctttaagttcttagcattttacttgtaccgctgggaattcagaaaagtaaatgacggtgagtgctgtgggaagaagggtttctcaaccaggtcaccagacggctctaaccattcgacagtatggtcacgtgcatgatgtccacccaggcgtgttcatctcttctgtggtaaatgaattgccatacagatgtgagtgcagtcatccttgctcaccctcatgtggattgcaacacgtctaagacgggctccaggccatcctcctgtctcacagtacacagtggcttctgctctccaagcctgagcgtcgtctccttccctgcatgtgtagctctgggcagaaggtgtctctaacatctcatcgcacctcacgtccctccttgtacttgagctctgtggagtcttggaatacaggatcttctttttgcacccgaccctgcttttttgcttgtagcacaggaaggtcattgcactagctcctgctcatttgatttcatgcatgaagtttgaattgttgaaatgttccagagacttgcttaaagagctaggagagtctaggctgcacagagtggcctgtctttctcacctcttcctgccttcctttccctcggtgccttcttctccagcatcctgttcttagatcctggttccccgcagttgtcggaggagccatttgtagatttgtgggactttagacattgttgcctgtttgcttgtctcctgttttgctgaaacggtgaacccccaatgtctggtgcaagttttgttctaagagtggtttgggaatgtggacacttggcttttagagagggcctgagaacacggcagaaccacttacatagccccctcccccatcctaattgttaagtatagatgtcatggtaagctcttactgtagagaactctgtggccctctcccctaccccatttaaatgatggggaaaaacagtcagagagaaatgacatggttagagcttggcgcaaaacctgactgaagagctgcatctctaaaccagttttctcgacagcccggcagaacagtgccaatacattgcacagacacctggaagaggaggaaggttttggaacagagccccgtttacaggtccttggctggaagaggctggataaaatactacattgtaagcaatataacaaactgtacttcttgcaggcggcagtgcctccggcacacattatttctgaccacatctacatattggctgatgaacggaagtgcattgattgcttcttgcctggaagttcagcctggcatgctagctcctgccaggcaccgtgggaaaacctgtacaaattgggtgggtcatctattgggaattagacaggaataatcgggctttaccttattccccctgttttaagtgtgaagtggaatgtcccgttcagattctaatctaaaagatgaattgggaggcttcttgcctaccctttccagtttataattgattatcaaggggacaattatctgtagttatcagccattttcccccttgtggtcataaactcctcagctactatcctgtttgcagtttttttgcatctctttggtagtgaccattaccacccacattactaaaacccacacatggcacattccattccatgcccaaagcaagggcaagactagcagcgcctcggctactcttgcttattgttctgggtctaatagcttttgttttgtttgtgttggagccgggagggtagacttgggtgtgaagcttggcgggatttcattttctgttcccatcccaagctgccatgtcattgtcctccatcctccagctgcgggaactggcaaggagaggtgtgggactgcgcagaggggcctgcagcttattcaacagtggcaaactaattccattctgtttctgctgtaacaggccattggccatgcatagggtagcctttctccgagcatctgctttttcagtcctactggcttcaagtcccccttcccgctccagtgtcccttctgtctgtatttctagttgctccccactcgcagcgttagattgaggatgcagaggcccttgcttctccctgttgaaaatgctgactcgcttcccgtctgctgctttctcttgatggagctcttcatactgcagtttgtctttaaatgggctgagaaaaacagtgaagctattgcagtctaatttggaataggaacaatttggcttttgtagtaatctgtaactgttccattggccatactcagttaccaactgtgcacagcagggaaggccgtggtgggtggcagtaaccctgggtctgctcagctcactagctgctttccttcataggtacaacctcaccatctctaaaaaaagttaaaagaaaaagtttctattttaacacgggccagcagtgactacagtttgttctgttgcttacagccatccatagggtcagactgactctaaaagacagccctacagccctcgggaccaatgcagagcagtccagggatcttccagggccttcaaactgacgcagttatggttttcttcttaatctatgtacacttttgtaagacatgtctcttgactggaactttgcggttgtctgaagttggactcttgaagttagaaccttggaaatggcgcctttctgcagagtggcgatgagacgggcttcccgtgccgctgtgtttgaagtggccctctgacagttttcttcacatgtatcaccagagatctctcctgctaccctctactttcatggcatccggatggttttgcctaatcttgaaacttgacgtccatagtggagaaactaactgctctgttctcaaaaatgaacaacgaaaaattcaaagccttagtttctgtaaagaggagagattctagaggactcactcctcgctgccaccttctgtcgtctgaaaagccaatttaccagatttggtggcttttctcacaggctatgagcaagcccagatcattaaagcactcttgtaaatacttgatgaccttgtagcctctgaggtaggctttcttgtcagaaatgcgtgttgagtgggctcccaccctggggcggcgtggcgtggtccacaggactgctggacattttcagtccagcgtagcacagtagggtgagttacacactggatgttcctcttgttggtgaatgaagtgctaagtggagaagagtggctcgcactctcacaatccggcttcctctggggttataaaggcacaggggctgccatgacagaggtttgcttcttgcttaactccgatgttctcactgctaaaggagggggagggggttacctccaggtggctgtgtatgctgtatttcctctgttttctgtagttaaaattattattgggggccagcttttgctctgataaattatatagttccagagggtttttttgttttgttttgttttgtttttgtgtgttgtttttgaagtctgagaaattgtcctgagaggtgaagtagaagtgcatgccacctgctggaacccacagaaggctcagcttcccttctctcctgccctgggaggggctgaggggtgtgggtaagccccccctcagcagggctgccagggtttgctcctcgttgcaaatagagttaaaaattaactcttaaaatctttcccattaccctccatcttaaaaggatgctattttgactggtcatggtggagaccactgttctttactggctgtttgctttaacacacctagtatgcaggtttattagttaagtgcatttacacacacacacacacacacaaacacacacaccccaaacctgtgtgttagacacccatctaatttacggaaaacttgagtctgatttgatgggcattccctgtggatacaagtctctgccatgcttttatagtgtaaccacttctggtgccctccaggcgcacactttcatacagtatatttgatttccatgtttgttttaatacagtcaaccacctagtgtttcagactccctttacagcagggttttttgtttgtttgtttttctctttttaaaaaaggctttatttattcatgctgttctcatgagagaacacccgggtgctaatagctcaacagccttttcccagcttctgagtgccagggtgcctgggcggtggtgtcaactgttgggtcttggtgcctgtctgtcactgtcctacagcagagccttactgttctgtgtctttatttttttctcgtgtgggttgttatcctttagtttgttgtatactgtaacgttggtttctgttgcgtttctgactctttgtgcccttccttttgtgtctgttcccttctcctctcagtttgcagcggggcctcgacctgcccatcatcaggtactgtactcttgtccctcacggtcaccctgactaacataacatgtggggcttagtagctgctgacccttagaatgctgccccgctatgtgaccacccagtgacttcccagagcagcctctgtctggcaggttggcttggctttacttcttgttagtttcactgtattttgtttttaataagcccatttgccagagcaaacttaaaacattttttctttccttgaaatgatactttgaatttacataattttgaaatgttaggtatattaattcttcgtgaattttattaataaacttaatgtgatggagcaggcaccattctaagggttgttgttaacattctcctgtaactgatactgatacataggatagcgttcctcttgccaaagaattactaacttagacctcataacaaattaacaatgaggtgcattcatttgctatatagaactcttcatatagcttacttaatctgaatgtgttaacttattattctataaggcattacagaaaataatctttaaaaagtcagacacaagctgtgcatttgcagatttgtactaaaggtgatctgatgtggggaacaaggctctgcttgccgccttgtccccaggctaacacttccctgcgtgtctgagacattttctctgtggtggagtaggaagagccaaggttaatattaggcttcatatttaccaggcctactgcatgcgaccatctgcatgagcagctctctttctgagcctcagttccctgcagtgtaaacagatgcaacaggaacgtgcaggcacacagcatccgacacagtgtgggcagtcacttggtgctcttaatgatgcttctaatcaacatagtactgttgagagacgtgaggcggactgtcccttcctgcgtttgcccgggatgctctgtccaggatttctattacacattgtgtgctgcctcacttgaagtcttccgttatacagagtgatttgatacaaagctccatttcttaagatgtagtcttaacaatttggaggagacggggccaccaaattctgagatattttaagcatgggtatggcatggatgttattctttgtttttttttttctatcttgggatgggtggcggggttattcacttatttcagtttgctgatacactactacaaagactttggggtgttggcactaggcagacgtgagcttcagtcccccttattaactgagggttctggataagttactcactgggctcagcttcagtttttcatctctaaaatgggattgataatgatgcctcaaaggaatactatgaagaatatgaagataatggacaggaagcggtcagcaggatgtatctgaacatgtgcgtgctactacttacaaatgtaattcctttaagattcatataattaatacaattgttcttagattcatttagtatatatagatgttttacctacatatatggctacactgcatgagcactgttgctcttggaggccagaagagggcattggatcccctctggaacgggataactgatggctctgagccaccaggtggacactgggaatcaatcctgagacctctgcttagccactgagccatgtgctcagctccagaattaatataagttttaagaatttattcaactctgcagagacaaaggttttattttatcaaggtgaaaccaaattctgctaagagagaaacaaggacacctgatccaggagcagaaccagcaagggtggtttgtgggttagctggtgaaggaggcgcctcctgactcctgtaagtctccaccctcacctttgtctgcccaccctcccttcctccctccctcctttctaaagatttattttatttatatgagtacactatagctatcttcagacacaccagaagagggcatcagatcccattacagatggttgtgagccaccatgtgtttgctgggaattgaactcaagacctctggaagaacagtctttgctcttaacccctgagccatctctccagccccaacctttgtgtttcttaagcattggtttttctcagggaagactgccagtagcagtaattagattgcctttggccgctctcctcctctggtggtagaggtacagattacacatgaaagggtgattctgaaactgaaacagtggcactgtcttggcctcactcactagagtgacaaacaaggtggtttactctaaaacaggtttctgctctcccacgagtggatcagaaactgaaaggctttgtgtttgtgattgctgggatgtgctgcagtggccttgaggtttgaatactgcattaagcactctaaaggcttgctctgagcagtcctttcctaagctttctcttaggtatgtgatttactttcaaaaagtgctgggatgtaagattggcttgagtggccatgccccttatataaaatacatctcagggaggtggttggcctttcttcctcttctaataatgcttatcttacaatacagccttttttgattgttttcagttctcaaagaataagctaaaaatatatttacaagccaagtaatccattaaagcatcctactcctaaatagagaggtgtaagtgtgtgttgcattccttagcacaaaaggtctttgcttgctttggtaggatgtgtcatgcagcttacagcagctgagggtgttgctctttaagttatcccttgtggatgtgtgtgctaccgtgcacatatgaatcctgaggacacttttatatggagtctgtttctccttccacagaggtggctcaaactacctatatttgagggatcaaattcagggcctcaggctcttcctcaccgcaagcactactgctgagccagctccctagcccagaacttgaacaactactacttctacttctacttctacttctacttctacttctacttctacttctacttctacttctacttctacttctacttctacttctacttctacttctactactactactactacttctactacttctactacttctactacttctactacttctactacttctactactactactactactactactactacttcttcttctcctgctcctcctcctcctccttcttcgatttttttttaaatttactttatatacatgtagctgtacagatggttgtaagccttcatgcagttgttgggaattgaaatcaggacctctgctctctctggtcgaccccacttgctctggaccaaagatttattattatacactgtagttgtcttcagacacaccagcagagggcatcagatctcattacagatggttgtgagccaccatgtggttgctgggatttgaactcagaacctttggaagagcagtcagtgctcttacccgctgagccatctctccagccctgacttgtcatcttgatcctgttacgttttgtaaagagatgtacattagagaatattccctatgagtgtgtgacaagtatgatcgtggcttagtaagtgtttcagcagacatggacagcaatgagtgagttgtcatttgggaactatttgaagggatccttgtgaaaggaaaaccctgctctgtgtagtgagaaactactttttttcctgtgtaaaatggagttatgtaattaaatactgaatattttatttgttctcaatagagccgagaacctgctgttgaatcagcttcttagatttgtgtttgtttacaagatgtttagctgtatctggcacactgagggagctttacagccctgtcaggggagccccgctcaattgaggtatccagcagccgcgtgcatggcgtgtgcatgctgttgggtcttggcataggcagactgctttttgtctcgatttttgtagcctgtcattttgtaactgcagaacttttagcatcaacacttttcttccaagagaggagatgtatgctgggacactgtagaaagctgttagttttccgtccttcttacttgaaaatcccagggtggctagaagctaagagagcaggatggcctcagtgggcagagtctgctaggtgcgctgtaacccggcctgaggtagtgctttgtattgaattattgaaattgctgtagttgccatttgcagttccctgtggtgctatccttatcttgatttgggggttcacagtgagatcaagtgttagctttttatagtttgcatttttttttttctggtaaaagacatagtctcattgtatagccttccctggtctgccactcactgtctagacaagctggactcagacttgcaggtactcacccatttctacattctgagtgctgagagtaaaggcatacatcaccatgcccgccccacgtgtaccctgatgaagagagaaaaccaggaagttggtatctccccgtgttcacagagaagcctctgcagttggtcatgtgtgatattgacaaatgctgagtgtgtgatattgacacatgctgagtgaaatgctgtgttcccaatggttggctcttagtgtgagttggggccggcactggggaggaattctgaaatgtgtgcattcctgttggtttattttgccagaagataaatctaagccagttggcttgtgatttttttttttttctattcacaggcttgaaggtttttctactagaaagtgtacttttaagataaaggctttaaacctgcctctgatgcaacagctagggcacagcagagtttaggagagtgactaggacagtagaacaggtatgggagataggtcccaggggcagtggggagggagggagagtggccagcgccacctttccagcatcctctggttagcctcactaccaactgtcctgggcgtttgcttgcttacctataacatgggtaagatatgcttgtaaatgacctacaagtatgataatagcatcgtagattttctctgtgggagtttgaggtataaagtatttggcatataataaaggtctctggttcctcctccgtcccgtgtgtgcatgcatgcatgtgtacatgaacacacacatgcttaagccataggtgtatagtggccacaagagagtatcggctcctccctggggctggagggatccctggaagatcagtaagtgctcctgactattgaatcatctgtccagtcccttcctaagcgattttaaagctaggaatgacgtgttcttagaggctgttcaccctagactcttcctcctgacagaacacttggggtccattctcttctccctgaggcagcccttggtggcagcactgttaataaataggactttctgtggtgatgggtgtttccgctgtacacctttcactactgtgtgaagtgtgtgtagtgtgcagtagctcctgactgcatctgctattgatcacttgaaatgcagtggcaatcagttgtatcagtgagagtttgattgctgtgaagagacgccatgactgggcaactcttataaacaaaaatatttaattggggctggcttatagtttcagaggtttagtccattatcatcatggcaggaagcatggcagcacgaaggcagacatggtgctggagaaggagctgagagttctgcatcttgatctgcaggtatcagaaggagactgtgtgccacactgtgtagcttgagcattggagaccttaaagcccactcccacagtgacactagtgactccaagaaggctgtccttattggtgccactccctatggaccaagtattcacacacgattccgggagtggagggtgacgtttctgtttaaaccaccacagcagttttcagataactttgtgaattgtcagttacacagaagggttagatctaactgtggatgttagggaaagatggcgaatgaggggagggatgctgcagactgagtactttggagacagttatgtgtttcactgcctaagtttcttatatttgtcctaataaatggtagcttactgccatgcccactcacctgaaaaatagcctgtatttcttgcatcactattaaatagaattgattgaacggttaggaaagagtattaacaaaccaaccaaccaacctcagcttctgccttgtgtttcctgctgacacagcttttctagtcctatacagatgtgaatgtgttgtgtgtgtgcatgctttcatgtgtgtgtgcatgctttcatgtgtgtgtgcatgattgttgtgtgtgtgtgtgattgtgttatgtgtgtatgtatgtgtgtgtctgtctgtctgcctagacaagaggacagataggctccagatatccttcctctgtaaggaacagtttgagtaggtctttcagatggcatggcaagcatgttcatgcatgtcaacatgcctctttcttgaaaaggcatagttggtctcgagtttagaagatatcttcttgactaggagacagaaattttgtgaaggaatcaatgcctcctttctcttagtagggttagttatgattacagatgtctatatgttagtgtgctggataaaggttccactaagtcccctctgactttgaaatgaatagatttcttgtggttggttgctttctatctcataagaggtactatctgctaaagccaacagtccagacctagagcctaacgcagcagatgaggagcccccagccttctaactctgatcctctgttgggatctgtggcagcagcagcagcagcagcagcagcagcaaatgccttagagaggagctgagagcatgaattagtgttacacagacactttgggccacggctggtagcttcttaatgctggaaagagctcatctgtcacttaatttatccatgtcaatggattttacacagttcaatgttgaaataataaaaatgtcttctatcagcgtagctacacatttgtgctgtgtcagcttggcttggctcatatcagcagtttgattagaaacacttgggttcgacatgcctgaaggaaatacactattcagaaacgcttgtgaataaggtagtcagttttcttgtgcaagcttgttaaggatcgcatcagagtagctgagatatcggtcaggaaagcgcttgtgtgtaggatgtaggagaccttgccctgtgtgttttccgtgtacttgtatgtgagctaagcagtttcttgtcttgtcttctcctctcctttgctaccccataacacgactcttcatgggggtgggagttagtgtataatgtcagatgatgagctagcaaaggagatagcccatctgtgggtttgtggctcttcttgttgatttcgtctagagttgatggaaagtgatctacctcatggcacaagcctctccgtccttccacatcttacagtgttcatggtgagcgtgcgacagtgaccccttcttaaagccagcgagatctccgtacctcctgatgtattgtcagtggagtagaagtgctgacgtttgttctaaaactgtgtttacaaaacagacttatgtaagtgggaatgtgtctgttggtcatggaatggagtgtcaccatttcagccttcctgattgcagccgattcaaatggtgtctgtccccatagctgtcagtagagatagacaaccagggaacttttgttagaatcttaacattcatccccaactcttaattcctcagagagcaattttgcctcttgtctttttcatctccatcagctcctcctttggaccctctgggccctgctcatctgttctcctgctctcctgcgctcagatcgctttggggctttccttggacagaggttgaatgggagtgagagctgcccccccccccatcacagttctcccacgttcgcacaagatgaacagttctgtagacctggaatgcctatgactcaagagtctgaagtcaggagcaatgcttgtgtccagtcaggaggcagttcagggcctttcagagctgggccacgatttttcagtttggtattagagctctctgatttaaagctgttttgtttgtttgtttgtttgaatgccctatttaagttaagactagactgttgtacgatagtcagtcccaagtgtacgtctgttaccaagctcttgtaaaaaggtgttacagaaactgctaggacgagttttgttaaaaagaaatttcaactgtgtaagtagaagtttgattccatgtgtgctcgcgtcccgagtggagggttgtcaggctgctggcgtagttctgattcttctctggagcactgagcggaaagttggttttgctgcgttgcatgctatgccccgcccttcctactgatctgtaagcttttccattggctttctttctgtttcctgctgcttcttgcttcataattgaagggaggattcagacccatccaggtaacacactactagttctgcatggcctctttactactctgtcttccgttaatttacagtgcgattgctagcgatagatgcagtcatactggagactgagtctaggttgagctttaagcatgtatcgagaactgtgccttagcctaggtacggctgccgcgggccggcgggtgggcgggtgggcgggtgggcactgagttctgctcattttagactattctgaagctgattttgattccccacttttttttgcagagtattttagaaagcagaattgggatgggcttcagagtgtgggtgtgtcactgacactctaaagacaggcttctttctatctgagacagacaaccttagacaggattttaacttggtttgctggacttggaagaaaaggcttgtgctcatgtggactcttttctcctaagtagtttacagatggctggtaatattgctttaggttgactacttctaatttttttaatcatttgatcttgaaccactctattcagaagtcattgctttttataatgtagtgtttagggaaatgccagttcctttgttgtatttgttttagatattaaaatgaacagttatggtgcatggcttaaacttttagacagtggaggcctgagcatggagactgccttgtgtttaatgcattaacattgatcagaacctgacttagtgtggaatatattttgtgaacttagttattatagctccaagtagatgagtttagtagtgggggaaggagaaaacttaaggtactaaagctatatattaccctttgtgaaaaaacacatttttatctccctatcccagtttttccagaggcctcaaatccagcctccccgagctgccatcccaaacagcagtccttccatccgtcccggtgtgcagacccccaccgccgtgtatcaggccaaccagcacatcatgatggttaaccatctgcccatgccgtaccccgtgacccaggggcatcagtactgcataccacaggtaacagggcagcctgggtccagcggggtgcgggtgggtggggcagtgatcgacagcctggatttcgatgtgtgaattgttttattgactatatatccattttttgttgtcaactttaataaaactatctagagattcttattcaaatacacacgttgctggagacctcttccctgtcctgtctctcccaaaaacaagcactggcttatgtttcatagccaagccttcatgtcttgtagacggtctctgcacatggtgctttagtttctggaaacttccctgtgtcatctacacgtgtgctcttttctagtaccgccacagcggccctccgtacgtggggcccccacagcagtatccagttcagccgcctgggccggggcctttttatcctggaccaggacctggggacttcgctaatgcttatggtgagtaaggaatcgtctagctgcttctgctcattggtcacgctcaccttagtctgctggccacgttaggtattgctgcttagaggttcaaaggatttttaagtgcaatcttataaacggttttgtcttgagagatttttttagggagtagcttacaaggaaatgactataaaagtctgtgtatcagtgacacccaaagggctcatcatcctgttggagtcatgtggcaggtctgggctttttccaccatgtaactgtcaggcacatttttgtgtattttgttggtagtctacattcccctccctcagagctttgattctcagcacactctgtccttcatctcatgaactatctatggtgcagggatttcagtttctttgttttctgctctaacccaagcaccggcgacagtgagtggcagactctggagagtgggctgtgggcagtgatttcttccctgcacctctcaggcagcaccattgtcctggggcagttctgaggattagctgagataaatcttacaagatgcctttggacggaaagtcgatggggagacaggttctcactgggtacactgggctgtccttgaactcagaatcctcctgcctcagctttaaaggtgttttctgtacaaagacacagatgcaacgtgataactggctcgtgagttcacagggaacttagaaatccctcagataatcgaggaacgctcgggctgcatttgacacgtgtttcacccgcagctcagagctgtaaggaggaaactcagaatacgaggaactggggcttcggatgcagccatcagtgctctttcatagtgcggtcaaaatacagcagtgaggctttgactgtgatcacacacaatcatactgtgattaacacagtaacccactcagagtcctgcccttccgatttagtggcattgtggtagctttgcagttacttgcactgggctaactcaaagtctcttttggtggcaaggttcttaaagtgtgaaatcttccttgtgtgtgtgtcagtactgcctcatgaccctgtttcaaaatggtttatcttattatctcaattttctcaaatacgtagaacagctctgttaagttgtattctgacaataagtattgttatccaaatcttctgagtagaaaaacatatttttcagagtaaacgtcctaaaattaatatttctttaaattccatgttgcaaagtgaatatgttctaattgacagaactgttttccatggtttctcactaagtatagtttgcagcatcctcactggttcctagagtgatcttcagactctgaagtggcgcactaaattcttcctgtgtgttgaaacccgtgctggctgttgctcagtatgacttttgcatcctatgtgagaagtaagacgtagctttcagtttgtcatgctaaacgttggcttttctgtccagacagtggtgacgcatgcctttttgtcacagtactcaaaatccagaggcagtcagatctctgagctcaaggccagctgttctacatgaagatttctaggacagccagagctacacatagagaccctgcctcaaaaaaaccaaaacaaaaccattgattgatttttttttttctttctgttccaaggttagctcaggtgtcattgacatctgatccctttgagggatctctttcccgaagatatattaataggcatgtgctatagccattcagcgggcagagcatcatccacactaaatcactgtttcctgtgtcactgtgtcagtaaccaagtcagtgatgaaaattcaaataccaaaatgcagaaagctacagtggctcttaaataacacggaacagtgtcatcctctcttctccatttatttaaatgggcatgtagctgtttctaacatgaacgttatcactgggcatctaaatgaccacatacctctccccagctcgctttctccattcgttcannnnnnnnnnnnnnnnnnnnnnnnnnnnnnnnnnnnnnnnnnnntgtgtaccatggagcatatggaagtcataggttaacttgcagtagtgtttctttccatttcatgggttctggggatctgattatcagacttgttggcagtgctcactctctcccagccttctcgtcactccttcctttcctaccttaaaacacacacacaattatttgtttcttttgaaaatagtatggtctagttttggaataaatcataagtgatgttactgctaacatccctccatccttccttcagttgtgagatgctgattgccagtttctgtgcttttctgtgatttagaattcgggccggcccattagtcccctcagttgtagacacctcaccttcctcatgagggattgtggcactcttccctccttcctggctcctcctcttaccttgccactgccagctactttccttcttccttgggtgtaattcagagtagatatgggtcacagcgctgtgtaccagttcacaagttctcgtttctccagaggagacctaactgttggtctaccattgagttatatttccaccccttttagaagacgtattttcagccagtgtttaatgagttggcttccaggttcatgattctacttccttagcctctgggaaagtacaagtgttcttgaagtgtttttacaattttgagaaagttagaggccagaacgctcataggtcagcctcaaggagtgatgtcccatgttgacagcagttttagattcttgaccaaaagggtatggttagtggtggtaatgtttatgaagaggaagaaggagaatttgctatgtggcaggccttccttgcctaggcttgcaatccagtccaccctatgtctcctttcttggtctgttccctccggcgccttttgcactcttttcctgagcctctgcagaactctggctcactgcgtagcaagcagccctttaaggtcatttgagctgtgctgtgtttaggaaagtggtctcccaatagcatgcagaaaacaataaataaaatgaaagatgcaattgctatagagcgacataactgaggacacatgctctttttcttctggtgtggccagctagatatttaatcaacacatgttctccatgcctttggccagtgctcattttcatgtgttttcagcagaactatgatgtattgtgttgtgttcttttagaatgcagccagtttcctgcactgcttgggcccacctgatctcctgcctgtgtagcctgtgctgggcccgtgccctgtgcctgtgtagcctgtgctgggcctgtgccctgagcccagctgattggtcagctgtttgctgatgagtggcagccgctttctcactggtctgctcactcagtagccttctctatcttactccacttagtttgggaagtctggccaggtgggctggtggtctgtcctgtggcaagcgagcgtttgaatccagtttgagggtcgttcttgtataggagctgacagcaggcttacctcggggcacagctgatgagtctttccattgaatttcctgaaattgtagtcttgccctgattagatctctcccaaatcacttcccagatgccacagatgcccaaagagcctggcgctgtgccccgttccgctcctgggaagccacatttagagatgacttcgaggtgatgactgagccttttgcctggtcaccttgtctccaggcgtttcttcctgtgtactggaccccagcctggccacacgacctgaggattagtcaccagggatggggcaccaacttcacacccagtacttaacaataattgggggtggagggcttgtttctttctttctcttttaagtaaacttgactgtgtagctctggcagacttggaactctgtgtggaccaggctcaccttgaatttacagaggtggacctgagatccttctgagagctgggattgaacttgggcactgccattcctggctcagtaaactttttaaggaaaaagattatctctctgcacagtcttttttcttccttcttgctgcttagccttcatgcttacagagctgtgtgctctcttgtatgtttgtctgtttgcgtttttgagacaaagctttcctcgctaagccaggctggacttgattccaggatctggctgccccagcttctcagcgctgccactgcagtgtgtacctgactccccgatgctgccgcgtgtttgagggtccccggctgatcccttcatccccctccctctctgcaggtttttcttccttctgtgaactctgacatggatgctatcttgggcttctttgtctttattttctgacttgtttactcccatggttctggagttattcaccacaaaagcctttactagtgcggtggttgaacacccttagttccagcactcggaggaagagtaataaaataaaataaataaatttcggggcgagtgtggtctatctagagagttttcagatagccgaggctacatagaaaatctgtcttcaaaacaaaacaaaaacaaagcttttattaattacaaaataaacagctgtggatggtgaggtgcagcccagttgacagagtgcctgttctctgtgtacaaagcatccggtttcaccaggagagccatggaaagcaggtgtgctgagacggccttctaattcccgcactgtgaaggttgagctaggaggatcatcggctcacaggctgctgccttaattccatagcaagatctctgtcagccctcactccgtgataccctgcaggagagcagtcaggaagcggtagggtaactataactagttcctgcctgtctcgtgactacaggattagtgagcctctcttacagctccaaaatggaaagctttctcatccaggccctttcttccgtgtttcatgtgttactgagtagttcccttgttcttcctctcaggcaaataaaaatttaaaaaagacccttaaacaattttttttcccaaaatatattttcttccatatcatccagttctttagcaaatcttttggttttattttgtaactctgcacttctgcccacccttttctctgtgtgccacaatttgatagtacttagaatagtattgtgcagtttggatattaacgaaccctttgtgtctaagactggggagaagaaaatggtggcagttgggctgtggagtcaaagcatgaccaaagtccaccttttagttttggttgatgcaactgtggtaggtgattgtggtgggcgggagcaggaagtgggcaggtagagggaggtagcccttgtgtacagaaagtacaattcagcttgtagcttgcttcttggggctttgtcttctttgttagcttttgttaaagctcctcacccaagggcttgtgggggcctcccactggcctgctgtggctgtggctcttcacactgagactttggatcacctccgtgcctaccaaatgcagaaagatagtgagtgactcaagcccttgcctaagaacccctgttgtaggccacaggtcccagaatagattctttatgaaaaagcaacccagattgtgtttgaaaaagataatacgggtgtcactctgcaggaattggcactgagatattttcatattaaattctatggatgtttggagatagtccatattttaaggataatttcttgaccaattcagtagtttgtaaggagtttatggaaagatataattaaaactactgcccaggtgtgtggtggctcgtggtaatactccatccagcaggaggcagaggcagggggatctggcttgcaggtcagctcgggccacagagttgagaccctgtttcagaaagaagaggagtccctagtagtttgctttcgtttcccccaagagcttgttcagggacacggccctgttgtcaggctggtagtgtttgacaaaataactgaatgcttctcattttgttctgattccttaggaacgcctttttacccaagtcagccagtgtatcagtcagcacctatcatagtgcctacgcagcagcagccccctccagccaagagagagaaaaaaactgtaagagatcttcattgattcgtcgtaaattggagcatataatcatttctaaaataagcatatccaatcattattcacctcagttacaacagtgactgccatttcttcctctcctttctatctctgcctttcacctcagcctagagggtttacacaggcactcggctaggacatgcatatccacgcccttagtgtcacctctttccagccattcgtgctgcatgggtaagcgcacctctggctccttctgtgggaggaactctggcttatttctcagatcctgtctctctgatactacagcgctgagcaacatttaggacccgacacgagggaacggtagcaccaaattagaagaagccaaaatcctaaagagtcacaaggcgggaagacttggaagagagaaacacaaagcaaaatttaatagttaagaggacatttccctctgtctagtaagccacacccaagagcctaagagcgcagtgacacagaactggaattgtgaaatgttttgtagaagatggctcccagtgtcttccccagcagaacatagattgtgatgatgacggtcagcaacagccccagatccacacgggtgatggacctgggagtgtgcttgtcccatgtgctctgacctgagaccaagtcaccaactcagatttgctgctttggttagaaacaagtgatttaggaacatgtctcagtaaacagaacactccaatttagcatgacacagctggcaagaaatggagctttaaagtgttcacttggtatgggaaagttgtctgaatggtgtcctgtaaggcaggaggaaatggtgctaatgtatagataacatataggtgatggtggtggtggtggtagtggtgatggtcagcagtgagccaagaggaagctggctgtggcacacacttggtatctgagcttggggaggctgagccaggaggcttaacacaagttccagagatgcctgggctacacagtgagttcagggccagcctgggctaaacagaaaggcagtttggaaaccagacaaatgggctggtaatgaagagctgcttccctgcagccttgcagatagatagcctgatgttttttgatagtgaattctctgaagttctcaagaaagcagttagcttcttaagctatgcaagcaatggacatcagaaggggacttcttacccatggcccagctcagagttcctgagccctgggattccatcctcattatagcacctttgacattgtaagcatgaggaaccactgacagttgaaacaggaacacatgcactgagctgtgtgccactgtctaacttagcagagagcttggcagtccttctgtggcagtacatttagatctgcatcatccttcctcctggtcctttgattaatttacctgtaaagatgtaggatagcattgaactgttctgtgctcatttggcctgtgtgatgtgtctgtgcctttacttatacaaagcaacaggacagccactgtccttacagctgcgtactgcagccagatagagtcccactgcgatacaaatgcgcatctttattttctgcacttcaccattagggcattaaaaacttaactcaggcactttgttattcttaggctatgtgtggctctcgttgctattaagaactctgagtaaaatcaatgtatttggcaatcttacacgcacatagatggtttccttctttgacctagaaatcaaacctgctcagccctannnnnnnnnnnnnnnnnnnnacatatggttctgtgattaaagtagaaagttaacaaatttaatattatctgtgtgtatacaaatctggtacacagaacaccacatttactcttaccattttatttaatattgtagataagaattcgagatccaaatcagggaggtaaagacataacagaggagattatgtctggaggtggcagcagaaatcccactccacctataggaagacccgcatccactcccactcctcctcaggtaagtagagtgagcatgaccatggcggtgggcgctgggcactcactcattgacctcctcgctctcttccgtagccactctgtcctttcctctctgtcagctgtccagagcctgagtatctcaggaagcttcgacagacacggttctcttcccgagttgctttcaggtcctactggcaatgttttctgtgggttggcttcgcattcagagcacagatgctgccacacttgctattgagctgttccatgctatccaaaggtgcttcgtgccttggaagccaccctattgagtgagtagttatgagtccgctgtggagccttaggatgaagtgccgtggaagagggtggtgtcacagtgaggatgtacgcgttgtggccgggatgcttgagaagattgtccccgttagagtctcgttcaggacctacacagctgtgcttccaaggctgctctgtgagtttagtcaggcctgactggtaaagtatgtggctttggtcttagaagaaatcgaagagtcccaagaagagctaggcttgagcaaactgtgacttgtggcattgaaattggttgcccaagtttgaagcttcttaccttgttactgggtgacttcccaacgtaatcagtcacctgtcaccgagagcccagcagacagaagcacctgtttaaggggattgtttgtttgttctcatggctggaaggtgagagcccccagagccgatttacaaatgagcattagaccagaggtaaggcatggcagagtagccaaccgctgacttgattaccgccacagagcctcaaagaagtgctctgagatattgaggtcaccaagagtaagcgagttcagttcagagccctcgtaaacctgtgacctgttggcttgagtgggctgtgttccccttgggagtgatggtcctctctgtcgcagtccccattacagagaagagtatgtggccacctcggttagagggtttcaaggttgttacagaacttatttttgaaattgtcttctttaaacattttaagtctgaatgattaagagtgtggttttgtctccagaattgatcatgcaatgggatagtagatccgaaatgacctacatacatggtttattgacagccaggtataattctagacatagtggcctctcggacggcctggcgggtgctggagtagaacttgcagttggttggtgaggacatgcacactttgcaccctttagtctctttgcaaacatcagttaagatagggtgtagttgacaacttgaaattcccaccttgaaaatctgtacctttctgtattttaattctctatatggtgtgtctggttaggtttttttgttgttttttttaaggatttatttttgatcatgtatatatgtatacatgtatgtgtttttatgtgaatgtctaacatgtgtgtggatgtccttagaggccagaaggtgtgtccctctggagttggagttactctaggctgttgtcagctgcctggtgtgggtgctgggaacctgactccatcctctgcaagaacagtgagtgcctttactagtggagctctcttgcacccagcccattcctgtcttcggatcttgcaagtgtgaccctgtgccttcccagctcttcttcagtccttacccccttccctgggaccacaggcgcaagcacaagtcttggtgtctgtatggtgggtgacaactcagatagagacagtgattgctgtggagagcctccagtcttgtctcttttgtgttcttacatttgaatccacccgtacaaatcttggctctgtgtatgcgtggagtctgtgggatggatcgtagctgtttaattgatgagtgtactttccctcttaaagtcaacagcagaagcattacagcttctggcttcatttctgggaggtcatggaagctgtgcccatagacggctgaacttggtgaagggagattatatcgtgtcaaaaaatactgagtctgttcttttcctaaaggctgcaggctctgaacattggcgctgagttctctttctagaaagccctcggcacagggcctgtaatagacatttgaagttaggacatgatcctggatccacctgttgttgttgttgttgttgttgttgttgttggagacaggatctcacactatagctctggctgtcttttgctctctagaccaggttggcctgaactcacagaaagtgtctgcctctttcctcctgggatctggtattaaaggtgtgggctcccccaaccccgcctgccagtccatcttgaatggctttctagtttaagagctactatgaggacagccttctctgttggtgtgttgggccaagcatgtttttgttctcatagtgtacctgcttttgtttccagttagcaagaagtctgggtctttttctgcgctgtccagaataaaactgtaggtgggtaagctggttctgacaggctgtttccttgggtgtttgagagtagatggtgccctctagtggtagcagtctttatgtaggccttgaagttgggattgctctgcccttagcagcagcaatgttacagctctgggctataaagacctaaccattctatccttctccctgtacccagactccacagtctctatccagtggccttcagcagtgtttatccttcaggctcagcctctgccctcccctgccatctttcttttaatttcttctgccctggctgttcttaaaccatccagtttctttttcgtttgctgccaagcagccactggctgccttgcctcttctgctgagctctgccaactgatcacctgctgttgacatgcctactgactctgccactgaagacactttgatgtctattttttttcttgtgagctcagcccatacagcggaaagtaggcaaggtacaacttgtcaagccttttattggacctaatgtcacaacaacaggaagggtgacacttgacagcatctctctgcagagtcagtacttgagcctcaacagtgtgcgtttgtatccagatgagaggtatttgagacaatcacaactcaccttgcgtgcaaacaaaggctgatgtctattccaatcacaggctttcttccttgggctttctgctaggtcagcaagtgaggtgctccccttgtgtcccagatggtaagggctacagggtcacctggagtccatcatggtctgtgctagcacaaactgacaactggagcagacctggttggctgtatgttcaagagctggggcagacttttgtaattgtgtagttttttttcaggcatccctggaatgttccaaatggccattgctggcatgcagcgtgtctactggctactgaactacagcccttcagtttaaggtagccaggatagcagtggcacccccacagctagggggcatagggaattcctaggaaatctacttatcctacccttggtgtctctgcctaattaccaggagtgctcccaacgagagagctctaactgcttattcccaagggtgactttaacttgttttcatgttcttttctgaaataagggccctggcccagactgatggcagttcttctgcccagcctcctaaggttagaatggcagacatgtagcactatacttacaacaaattgtagcagtgctttaaccctgcttagcatctgaccagacttcatagcaggtgggatcccattacttaactcctttgaagtcccacacagttgcttgtgcgtccatagcaaagctgactgctggcatccaggctgcccttggtttatgttcagggttgtacagcatagactacacagagtggcagatcatagagaccgggtactagtgggttaggtgaggttgtattagagagtcctgggagttcaagaatgggatacagacagaccttacagaaagataccttacagaaaaatgtaatgtaggaatataacacacacaagttagtaaacagttgagtgctgtactttgcccctgctgtggtttctaaggctctcttttaaggctgacagcacattttagcttggcttcagtctgcaggtctgtgcacaggtcagctgagtgaggaggttaacccacaataactgaatcaagacagcattgctcataaatcgtgtgggactcaggggtcagcaggtcacaggaagcatgaaggcatcaaagagatcaaccagtggggctgagaggggaagaaagaccgggtgaaaagactggaccatgccttctgtaaggcctgtgcctattctctgtcaggctccccacggacttcagtagtaaggaaagatgactctggtgaaggaggcaggtcttcttttgtctcagtgtgttgtcatagtcatggatgtgttggcttttctgccagtgggattcataaacagccacacatggaacttaactgagctaagctgaaggagtctgcatggaactcatggcaggcctgagtcactgaaagtcaccagagatggccgctgagggtccattgacaggaacaatcctggggtccacatgacgaaaacctgaaggcaaagggaatttttactgttgctgtctgctctaggcgtcggtgaaactacaggctgtcttccctagtaagtttttagatgatctctgtgtgcctcctacagatgttatgtgtcatacacatagaaagtgtgcttcctgtgaccatggccccaccagatggtcaccgtgcttggacgtagatgtatgcacaggtcttagagaacggatgcttttcacctgagagacaaagattccactcttagcgcagcctagtcagtgtaactactacagtggagaagaagcaatggtatccgcgccccccccccccagtagcaagcccttcggccattggtggtggttagtgaccaagagaggtttctatcctcagaattacctgctgcgtagcagctggcctctgaaaaggaacagaagagattagatagataaaattttaaaatgtccacgtgtagtcagtgatgtgtagaccagaaggtgttggatcccctggaatgggagctaccatgtgggtgctaggaattgaacgtggctcctctataacagtgagaagtgctcttaagttctaagccaattctccagcccccaaatagattttacaaactactgttcattttatttctttcgccctcctttctcaccacttttaggatcagccttcgagtaaataatagctgaaacttggtaaagggtcttgtggcaaggagcacaggtcagggaaaagttggaaacggaatcattggcacatcttgaatgtaaatcttcttctgtagtttggggaattgccagagccataggggagttgtcccttacagaacagctccacacacacaccccacctctgggaaatggaatctgcgacaagccatttcatgctttaacaactaatagcttcatgctgggttggcagcacaggtacactcctgtgttattagtgtaattcgatcaggaaggaggcaggacaaacaaacaagaaaatcccgctttaacttttaagtagcgatcttgtcatccatgtccaaccaactcgtccaatttggcactgacgagttggttgctctcttctgagaagcgtatttttgtagttttaaatggtgattgtagtaaagatgagagttattaaattaagtcacattgttcttgttagtatggtagtgttagtactagcctttgaatgaaatgttactattcagtatgacgagccttaaggactaagctggcatgcattctttgtgtttaaatgcaatgtcatggtgaacagggtctgttgcatgcttaactgtttggatttagagtgaactgggtgtggtggtgcacacctttagtcctagcacttgggagacagaagccagggggcagccagggctacaacagagaagctctgctttaagccccccaccccctaaaaaagctgttagaatggattatacccaagagataactttggcttgatctagttttggcaaaatatcttcagatacaatttagattccccatttgtcttaaatcagtcaggaaatctcactgccttaagaccaattctgtgttttcttgcacttctgggtagaagccaatgaagccagtgtttaggttgtttagccagtgtgctttaggttggttatagaaaccatcattctcattagattgtgttttcctagttttgtagactacagttaatcaaactctgagtgagttagtctttgcttttagagcgtaaggcttcactttacatgtgttatgaaatacactgagcaggagtaagggactcctggcaggcctccaccaggggatccctctcaaatttgccaggcctagtattaaaggtttattgtgggaagggagaggagcagggacctggaaagggggcagaagaagatggggagaggtgagagggacagttaagggcaggaagagagaaacaggctgaccaggctggaggaaggggggagacagagacagaaactgagatggagggaggaggagggagacttgggtagcaagcagttctctcgagtgctgctgcccttgtctctcaccagtggcagcacgggtagtactgggagatggaggtgacagcagctgttgctagctagctgttggatggagcctagtaaattgcacgccctctggacactggaatcagctgtggtggtggcatgcgtacagttcctgttccctaccacctgttttaagaatgccaggcagtgagagtggagactgtaaccatccagaaactgatgcacattgttatgaggaattagcatctgtccttcatgttagcattcgacctgtccttcatgttaggtctagaaagttagaataacttccttgaacaaagtagcacatgcctgtatctcagagcttgcaggagcagggggaacagaagttgtggtcatttccagctaactattgagttcaaggcagcctaggatacatgagacctgtctttacaaaaaaagtgcaaatgaaaattaacctagctttatgtctgtacaagtacaggtaatcaatctctggaagtgacaggaaagagaaggttaggaggttaggccccaggtctgaggtcttttcagacccttctcgctgaatgtatatgcatgtatgcatttgcatgtatgcattcgcatatgttctgtgcctttgggtttatgtaaaccatttgccacagcatcttcttaactcacagaaatcagattcatgctttgccacaggtataattcccaagggacagttatagtctacattaggactgcctgcattccgttgtttgtatgttaaacagtttaattgacaggccatcaaattgtttcaaattgtttcctatttgtgtctaagtgaagcatttggagtgatgtttctgcctgtttagggttacagagtttcccttggactatattggattctctctatctcagcagtatcagagcattccccttgtttataatttttttatctgacagattagaaaaaaataatcaaaagaaaaaaataaccatgcttagttcttatagatttctgaagtgaagagtttttattgtcttgtaatttctgtgtgcatatacattatttgtctttacatatttgtattgggatactatttgagttttttgcaagagccctttatatgttaaaggcattccttgacatatatggtttactttggtttttgctgctgtgacaaaatactgtaggctgggtaatttataaaccatagaaggttgtttggtgattctagaacacagtgctccgggctcaggccttcctttatcattccaattcgaaggtgagtgggaaggaagaggtagcaagagggaggaaggtgggcaggtgggcaggcagccctgagggagagtgggcattcattaacagacctactgattgtttgatgggtttttgttgtttggttggttttggtagaagacaggatctattttgccctgtctagcctagaattcacttttataaactaggctggccccaaactaacagatgttgaaactaagggtgattgacaccacattgggctctaagaccattcttactgtcttgaatatatcaggagccctcgggagtccagcagtcaggcccttccctggctttgcagctgtgttggccattacacttctagcaggaaacctcacacatgaatttcttattttgtgtttgttttgttaatggcagagtctagaactcactatttacactaggctgcctctatgcctctcagtctaacttctcctcagtgatttgtgggggcttggctttaatacagcccttcctgatccaagacagcacaggcagttcatgnnnnnnnnnnnnnnnnnnnnnnnnnnnnnnnnnnnnnnnnnnnnnnnnnnnnnnnnnnnnnnnnnnnnnnnnnnnnnnnnnnnnnnnnnnnnnnnnnnnnnnnnnnnnnnnnnnnnnnnnnnnnnnnnnnnnnnnnnnnnnnnnnnnnnnnnnnnnnnnnnnnnnnnnnnnnnnnnnnnnnnnnnnnnnnnnnnnnnnnnnnnnnnnnnnnnnnnnnnnnnnnnnnnnnnnnnnnnnnnnnnnnnnnnnnnnnnnnnnnnnnnnnnnnnnnnnnnnnnnnnnnnnnnnnnnnnnnnnnnnnnnnnnnnnnnnnnnnnnnnnnnnnnnnnnnnnnnnnnnnnnnnnnnnnnnnnnnnnnnnnnnnnnnnnntaaaggtggaactcatgggccttttctccctccctcacacatcccagacacctagtcttcctgtcttctctcaccctcctgcctccacagagcttcctagtgtatcacagacctgtattaggtaaaattcactcatggccctcgccaattcctgcacactgactgcattaatcttacaaactgtatcctattttctcttccctctggttgaatcctccacaagcagtcagaattaatctttacttttaaaattctaaacattcatatattattttgtatgtgggagtggttttcctgcatgtgtgtatttctgtgttatgcctgatttctgcctctgtgttatgcctgatttctgcctgtggaggccaggagaagacatcagatcacccgggactgaagttacagcctcttcaggagcacccaggctttaacagccgagctcatttctaaagcagagctctgattttgttacattgctatacaggccgatcattcacttcacagtcttctgctcagagaccctgagtgaacttgctttctgcagtccactcgccaaggggctcccattcacatccccccctcctcagcgcagttcactgtactccccagatgcagcctctcggacaataagaccccaattgtgctgcctttaaacacattttagccctccagtgtcacatttacagccaggtggagccagtacattgtctttgtgctccttgtcttggtatttatttcctttgactggatgtcaggtccattccattctggagaatttgtctaaattccagtagattctcagtgttttgttcatagttcacacagataaagaactgtctgcgagtctgtctgtccatcggaagtatgttttctttcttcctcattgcgtctttaaaattaaattattttgctatttgtcttgggtgtttctcagtgaaggccatacttgtttatattctctggacctatgcatattaaatataggagacattttatatgaggattccttatgttatttgtacataactgttggaagtctttgccttcttctcactggtagtagggtgggcacgagctgttagtatttgtatttcaagttttgttgccctgtcttctctgatactgtgagtctgctctagcatataggatccatggccccaccacccacacagttctcacaaatgaatgtattgggtttttttctagatttcccctactccagctatttcaaaatcttccaacattatagactagtcaagacctggttggtgcgccctgagctcctcttgctaaaaccctctgctgggacactgttgagtagtcaccctttctggacagaagcagtggctggattgtgcagaggagcatgaagaacagttctaaaatcctgctgctttgcccaccgcccagtccggagctcaggccgtccttgaactctgcggtctcagaagtgcaggggcagctgcgctcagccatgctggccacctccactgtctagcaaggagaccctctggtgctttgtggctgttgtctgtctgctacattgtgagacaagctaaccgtgcaggctgtgcttgaatctatggcaggcttccggtctcagcctctcttgagtactgggacctgggccgagccgccatccctgggttaaggtgtttaaggaggagtgagtccctcttgtatttggggagaatctgtccttggctcccaagtcctcagtaagcgtgaccctcagcgtgaccctcctaaccagaattagaaagcagttccctgtgttcttggaagctcttcacgccctgatttagattcccctttcactgtgtttgagtctgagggtctctgtgttccctcctagcagtgaggacctgcatcttatcaaggttttacaggatggaacttggcattggcacacattgtaaactgttgaagcattgaggggagattgctgacttagtcctagtctattgtgattatctggcatctttatggttttgtattgtcgtttgcagcactctttggggacagttttttcattcctacctactgaggtaaggagtgtgggattctgtgagtgtgtcaatgtatttatttctgctggaagtcattttctttgtgtgtctccagatgttcctattagagactgcatttaatgtactttgtgatttttatgacacattaagtgaaccaattcatggtattcatggtttgggaacacagggtacacacgcccctgtttggctcatggtggttgaattgagattatgccagattaagactaataaagaacaagattaaagtatttctatgttagtattgtcattttcttcatattatgtgatatgaagtgttcaaggtgacagtagtacagaccctttagttcttgcttacccagctgagccaggggcagcatttcctcacagtttacacagtaggtggcagggccttaatttcctgctcactcatgacacactcagctgtgtgcactgtatacgtgtgttcatgccagtgtgcatgtgtgcagctaagtgtgaatttgtacgtttgtgcaagtggccatcatgtgagggtgtgtggaggtctgaagacattgttgcgtgttttctcatgatcagcattcatctttatttttgttttctttttagtaaattttttcatatattttaatcatactctttcccatttcttaccctcacctccctatccactaacttcattcatgcttaagtttgcatgtgctctctctgtctgtctctgtctctctctctctctctctcacgcacgcacacacacacacacacacacacacacactcattcaacagtaagacaaaaaaaaaaattgaaacataaagctccgtatttgttttcagacctgggacaaggggctgaggtgcagattttacacatcaatgcagacctggcctccagttctcccagcatccctcagtttctacctggcataccctgcatgcaatcctgaatttaccagggcagaggttgggctgccctttccccagaggttcctccctatataatcctgacatcattattattattattttaagattatttgtttatcttgtttattgtagctgtcttcagacacagcagaagagggcaacagatcccattacagatggttgtgagccaccatgtggttgctgggaattgaactcagaacctctggaagagcagccagtgctcttgaccacggagccacctctccagcaccctcccccttaatttttttcatttaaagatttaaatatgaaagagcattgtaactgtcttcagataccccagaagagggcatcagatctcattgtgatccaccatgtgttgctgggatttgaacttaggacctctggtagaacagtcagtgctcttaacctctgcgccatctctctagctcttatcactacatttggtttctcttctctttgtgggtgacctctttctcctcctaccccgtcctgtacccccccccaatccctccaaggccaccccccccccccagcctctatccttggggccagtgaacttgcccaagagcatcttcccaataaacctgcctttaatctaatctgatttaatttggctgttttcactggcagtggagaacttacccatcaccctgccccctcctcccaccaaaaatagggttcatatgtgtctactcctgagcaacttccacatagatgctgagctctgtgggaaggggtttgatgaagacatcccatttagggttgagtgtctggagtctctcactctctgctctttgtccagctatgggactttgtttccctccctgtctactgcaagaggaagcgcctctgaagagggctgagccaagcactggtctgtggccatagctctttgttcttaggagtccttctgttgctttgttcaagaaccgtagcagcacatgctccctcagggcctatgtatgggcatctaggttcaagttcttggtgactttagcaattttaggtatggctctgtctcatagaatggaccttaaatccaataagaaagtgattgattattcaaattatcatactatctacctttttctttgaaacatggtttcagtaaacctgaagttgatggattaggtaaggctggccagccagtgatctaccaccagtgtgtactctgtccccacactgagagcatggaaatgccctctggtgcttttccatgggctttagggtcctgatgtgtagataggatagcttcctgcacctcccccctccccccttcctgtaatctctcactgaaccagtcagctaggctggctgaccaaggactaatgtgacctacctatctgttgcctccctcacctgaccatggagttacatgtgatgctaccacatctggcttttccacaagtgctcaggtctttacatttgtgtaactcacagctttactaagtgacacatttctctaacctccctttctgaggactctgctttctagggctgttaattcttaatgtctgtagggctagtgattggactgctcccctgcaatgctggagacccgcaccaggttttcctgccacagccaggctgagacttgtagactgtttgagggcatgtcttcaaagctagctgggcactacagaaagagcttgtagcaaacaagtgaatagtagttatttctttcatatggttttaaggcattttagatggacttttggtatttagagattcatgggtctgtctgagtagctgcttaccaccctaagccgtttatgtgatacttgtcaacccaggtattaagaagaagggtcctcacctgatcttctgagaagctgcagtccgtggtattttctttaataaacaaagcatacaaagttttcttctgtgtgtagttaaatgtttattaaaacactaaataacttggattcttttcctttttatctctctttggcccatagaattgaacagaatcaacattttaaatttggactctgaggccttcctaattttctatttaatatgtgtttccccagaaactcagggactcaggataattgtgacagttgccatttctttctctgtggttcaaaataaaaatagcgactttatctttactctgatcttagtagccattatcgagaaataattgtgtagtgtgagcagtttgatggtgtaatacatttgcaaagttgtggcattatttcctttctcatgatatttttctccctgcacatacagctgtgtataaattacatcttgcacaccctagaaagcagtgttatttattatctattataagtgatctttcacatttatagttccactttttctacacaagacaggatttctttttgcagccctggaactcagtctgtagaccaggttggtttcaaactccgagatccacctgcctctgtcgtcctagtcctgggattaaagtacgcctaactaattgtactttaagaagtttaagacacgtaactgaaagtattttttgctagccctacccgttaagtagcccctatcttaaccatcctgcactgctccctccctgcctgtagtaggaaaggtttctatggcagtttctgtagaattcagtataggataccaaaatgggccttcgccctcgggagacactgctttcttctgtggcttttgtctaactgtgtatccgtgcacctgcctggagcgcctatccttccttgtgttgctgtttgctctaagttgcacaatggctctagtttcctcagcctgcttactccaggtttagcaggcattttttagtaccagagaatggccaagtataaaatgggagttcctcctgttgtgagaagccagagctttgacttgcttttcagattcttcaaagtttccacggcgctggctccatagtgaaggtggcagggacctcagctactttgcacgttgcagtccatcggagagctcagcggctgtggcagccatcagggcctctccacatgcttggttcagtcagtcactggatgacaaatgcttatatgcctggtctgccctctgcgggcagatgaagtgctttgctcaggattttacaaggagagctgacagaacttttagccagtctgggacgatgttgagtcctgtcccgctgtggcagccatgactgctgtagtggagctcgagccaggaagggtcactggagtggttgtgtgggtgcttgtgctgtcttctctgccgtggttaatagtaatcatctcttctcctccctccccgctgcctctgtcctcctctcccctgtttttattcaattgccctatatacacccccaccccacttttaattttgtgacctctcgccccctctgcctcccctccttgcttggcttccatgttgctagtttttatgttcgcgtgctcattatcacccttttttgtacttcaaatcccagcagctgcccagccaggtccctgagcacagccctgtggtatatgggactgtggagagcgctcatcttgctgccagcacccctgtcactgcagctagcgaccagaagcaaggtttgtgtatgactgtttcctccctctatctttagtctcttgtataatgacattgctcacggtgtcccatcagacacccgagggttgctctgactgctctgtagcaaatctaaggtagaaagtgagcttgtaggaagggaggggaagggtcttacattgcacctgccttgctgttgctgtctatgtgtgaggaaacacttagcttgaggagagtgatcaaagcatatctatatattgatttacaagagcagcacaggtgtattttcaccattctatggggtagttgctatttctcagaggagataacatgtttcctataagcctgaggcaccagacctcagaacaaggagctgaagagagctctggaagcagacaggggccttggctgtgatgtcctgctggggcccccacctgggccttgcagtttcttctaccaggaccaggggtcttgggaggactctcccacccacgtgtaaatgacagctgttcctccatcattgctgatgcaggaacagtgtccaggcttctgctactgagcagggcacaagctcccaggcgcttatcgaaagcaaatacgatgccttttggaggaaaaagcttaaaagtgagaagtggtctttcctttcctgactgatggatttcactttgcctttgtggagcttgtgtccagtgctcagtaggaaaagggagcaggcacaggcggctgctgtcctctgcttctggcttcgctccccagtgggcatcaccattgtatgctctttgaggtctccattcatcaggtctactacagctagcttttgggggtgttggttgaagttggggttttttatggttgttgttgttttgtatttctagactgaatttctctgtgcagccctggctgtcctagaactttttaaatgttattgctgatactgggaatggtccttaaaatagaagtatttgagcaaatgctcttaattttagcatgattccttttttatgtttttttactttttcaaagggtttggtttcacacaagttaattacattcaagctttttgaaaagcttgtttgttggttggtggatttgtttaaacaaagtctgaatactgtagcttagggtggcctggaccttgtatgtagcgtgagctggcctctaattcttcagcctcctgagagctgagattacagataggagcctccacacctgctgatttcagttttcccatgagctactgtgaaataccagaccctccctctccattgagtattgacagtagcattaaacctttataagataattttaaaccaaaagataaaaaactcttagctggcctttttttttattattattattattttaaatttatttatttattatatgtaagtacactgtagctgtcttcagacactccagaagagggagtcagatctcgttacggatggttgtgagccaccatgtggttgctgggatttgaactcgggacctttggaagagcagtcgggtgctcttacccactgagccatctcaccagcccccggctttttttttttttttttttttttagagatttatttatttattatatgtaagtacactgtagctgtcttcagacactccagaagagggcgtcagatcttgttacagatggttgtgagccaccatgtggttgctgggatttgaactccggaccttcggaagagcagtcgggtgctcttacccactgagccatctcaccagcccccccgnnnnnnnnnnnnnnnnnnnncagcagtcagacatgtagaaggtttatgtgtgctcagtgctgagttctaggtatcagagccttggccttgcagagggtgaggtaggtttggggaaactgctttttctctccagtgattaaagcactttcaaaaagaaaagcttgaaacaggatctggttttgaagctcaagtcgtttgggaactcgctatgtacccagcactgagctcagggttgtgaccctcctgcctttagtattgtagcggcgctgctatgcccagcagtaagacacttgaagcaaacattcttgtatgattttactcatagtgacgaataatctttagtagattttccttaaaattttagtgcacttttgtacagatgtaatccagtcgggcatattgagtgtatctgtacaactctattgaatacatcttctttgcatactgcttccacaacgaggcttcgttataaaaacatccatatcatagtaggtaataagggttcagaccagcctgacaacactatttgaagttgttttaggaagaagactgctcaaattttaaaaatatgaaatatttctattttgacacttttaggtctatatatattttcaggaagggaaaatggaaaattctataatccccttagctgttttcatgtcttataaatttgagttaacaaaacaaattttcaggctgctatacaggtgtggatggattagcaaatgttttagactgtcttgagagtactgtgttttgagtactgtgttttgagtacatttgagagcgccaatgggcagccctttgtgactgaagtcgtcgtcacatcgaggattttcttgggggttctcatagattgccaatatgtgaagtgatttttagactaggtgggcttttgttcggggtttgaagtgtggcctcccgaagcccaggctggcctctggccccatctgtcgctcaggatgactttgaactcatgattttctgccatctcttgcggttcttaaattggagatgtgtatcacctctcccaactcctgtggtgttaaggatggaatcctgggtgtcactcctgccaggcaagtttcacccactaatgcaccccagcctcaggggctcttgcagctgatgctgctagtggttgtaactcaaatgctgctagaaagggctcttgaggaggagtttttattctgttcttttttgattatgcatttttctttatgcttgcttttcagacattaaattccttttagggtaagtgtagagagatgcacttacttaaaagacttgtaagctgggtgtgcctgcacacacctctgggcagagtctgaccttgtctacatgcagagttctaggcctgggactgcttaaggggactgcactgtaattgtcccccagacattagtctgtgctctgccctgttggttggttttctgtcttgtcaatgggtctgtcaatgctgaggtctgaactggtaacaaaatgcccttcctgctggcctgctcacccctgagtagagaaacgtggggtttgaagtcactcttgagccatttgctagttcggtagtttctggaccagaactgatctctaagcctcagattcctcttctgtaaaccatgagcacagtaagtaagtagtctatcctgatggaggggtaagaagtgaagggaacaatcctgccgggccgttagcccaccttgtgctaggttcttagtacatgtcagctgtgattattacactgctgtctcagaacccagcacatgagcagatgtgtttatgttgtatgtggacagtgacacagtgtttataaagggagaactatggaatgcatgaggaacttggcttggtgttcacctctgacagcagagagcactaactaaggcttttctcttccttgagagagacttgagccagtgcagcacaatgcttccagggtccagggcatcgggagaggtagacacggcagtccctatagtcgccacggcagtccctatagtcgtcagtcttcatatttttgggaggagtttgctctgcattcagagatggcatctgttgttactcggccctgagccagctggagttctcttggcattcagggcaggcttgcccctcagatagaggatgctgtcagtctcggcctcttcctagtaaagcgccatggcacctgcttgatggtcatgaaacgatcacagcactgtctagaccactggttggtcattcttataataatgataatccattatagaaactgggtcagcaaaatgaaagaaaagtgtgtgtctcccacagctagacatgttgaagtaactgaagtctctacagagcgaggagcttctcccaggagtagcttttgaagttaccaagtggacccatgtgctgtgtgtggtctgggtagcagccctaaaagatgggagtttctcagagctatgtaataaatgaatatccactaaacaagatcaacgaagaacacacatgtataatgaatgcatatggttcccatgcattttttttttctgccctgccaacttaacctgagaagtttggagttgagcatttactgttcttgctaggataatgagaaagcgcagtcttgtaggtagatgccttagcatggtgatccatcagctctgctttgctctgccctgcatggccgtgttctcgctcattcacagattttacattgctggagtcattttcatgggtgcggctacattgagagcagagtctctcagttttagagaacccacaagctggggacatcagggagctccccctcacagcgactcccgtgtcctttacctagacgccaagagctcagttgattagcacccctttttccttatggttattattttctactttttcttcttttctccatacacagattatgtttctatagacacatacatacatacatacatgtgtgtttcccatgagttaaagtccagtggttgctttagtggttccttaccttggttccctttgaggaaaccttgactttgtttctacactgctgccggttttggttagaaccttttcagagaaataagagttaattttgaaactacctttcatgttaaagtgcttggggagtttataatagtttggtttctgattattggtctttgtactgttgtacctggatagtagtgtgcccctactagaaaaatagtcgcaggaaacaaggtagagaagaggtgggggctgttttcgctttaaaatggttgcgctcagttgggtgtggtggcccacgcctataatcccagccttcagtaggctgaggcatgagcccagggtgcatatagtaaggtgaatgggaaagatctaatgttagcttctatgaggtctcctcttgttctcctgacatcaccatatggcaaactgtcttactcctgcgcaagtctcacgtgtcagtgtcctggagatcaaggcctaggaagtgtaactagagaccaaccaggccagtgtctttggagtcctgtattttggtctcttttcctgcccatgagtgtgggtaagtgatggacagacttggcctaaggcagtactgtgtattatgtgattcaaacttattcttaaaatattttatttcttttcccccagaagaaaagccaaaaccagatccagtgttccagtctccttcgacggtccttaggctcgtactcagtggggagaagaaagagcaagcaggccagatgcctgagactgctgcaggagagcccaccccagagcctcctcggacttcatcacccaccagccttcctccacttgcccggagttcacttccttcccccatgtccgctgcccttagcagccagccactgttcactgctgaggacaagtgtgaacttccttcctccaaagaagaagatgcacctcctgtccccagccccacgtcttgcacagcagcctcaggcccttcactaacagataacagtgatatatgcaagaaaccctgtagcgtagcgcctcatgatagtcagctaatttctagtactatcctaattaatgaaatgaatggagttggtgaaaaattatcagccaaggagaacactgtgggcatgctgagacaggaagtgctgccattgactctcgagttagagattctggaacatccacaggaagaattgaaagtggaatgtacgccgactcccattgccccgtccatgctgcctgccttctccccagctcctccgactccccccacttctcctccttgtcctccggttgtcctctctgccgccattgctcgttctcccgctgttgccactgaggtccagagagtcgccgacgagggagaaagcctgagaacttgccttagcaaggatgcaaaggagatgcaggacaaagcagagtcagaatcagatgggcaagcagaagagactgcggatccccagagcctacattcaggaaggagccccgccccaggtaagctgctctgcccgtagtggtcgcacgcttgctgccgctgaggaagagccagtggtggagttattttttaattggctactttccttgacttccagaaacatcgaatgaatgctgaaattcctagtctgatttcttcagtggtgtgcttgttttttagtacagcctgcaaaagagttactccattgtctaaaatacactaaatgccgccaaggtatctgtctctctgcattgttacttttgttacttaaactcacgtcctcagccttttgctctgttgcttcgaaactagaacggaagtcagcatggtctttcacttccagccctgtcttcccagggttctaagccagccatttgtaactgagtcctggatggagaactggtcagggaaattgcacgcagagttgcaattcctcttgaagagcaaagccccctttggttagattctttaatgtctcactttttctttgaaacgtttcactttaggttggcactgatagtgtacactggtaactccagcactctggacatggaggcaggagggctcagtcactcttgaatttgagattactctttctgcaaagtgacgtccaggctatctgggctgtgtagagacagacccctgtcttggttagactgaaaagaaagtttgattttccttttacgtttttatctagtcacttctatctcgaaatttttatagtcttcctcaagtcagtttgtttttttagtaatatcacctaggatcagatgggtctgatgactagattctttttttataaattaaaaaaatttaagattaccttatgtgtatgagcgtttgcttctgtatgtgtgcgagctcgcccatgtgtgataccacatacatgcttgtgctgagaaaacaagtcagatcccctggggctagagttacacatggttgtgagctgtcatgtgggtgctaggaaatgaaccctaagtcctctgcaagagctgagtcatctctccagcatgaaattattaaattttagttcagagtttcaacagttttaacccccaagttttcctggatcttactggtctgattctttggagagcgacccagaagaagtaaacactaccttgcccggtgctgtgtagttgtctttggtacatgtagcaggtgagttgtttacaaacgaacattctccatgtgctagagaggcgtgcatttcagtatgcatcatttcccagggctgtaagcatcaggttgcctcttgtttttttcctgagagcttagctgataaactatttcataatagtgggtcaggaagtgcctcgccaagcttatagtagtcaagtcctgcttggatcttcatggggtgcatctgctacactgtttgtggccaggcaagtgtgaactattgaatggctggatctgacgactatgcagatgtgttcagagtaactactttccacagacccattggtaacgcannnnnnnnnnnnnnnnnnnngggcccccacctgggccttgcagtttcttctaccaggaccaggggtcttgggaggactctcccacccacgtgtaaatgacagctgttcctccatcattgctgatgcaggaacagtgtccaggcttctgctactgagcagggcacaagctcccaggcgcttatcgaaagcaaatacgatgccttttggaggaaaaagcttaaaagtgagaagtggtctttcctttcctgactgatggatttcactttgcctttgtggagcttgtgtccagtgctcagtaggaaaagggagcaggcacaggcggctgctgtcctctgcttctggcttcgctccccagtggacatcaccattgtatgctctttgaggtctccattcatcaggtctactacagctagcttttgggggtgttggttgaagttggcgttttttatggttgttgttttgtatttcaagactggatttctctgtgcagccctggctgtcctagaactttttaaatgttattgctgatactgggaatggtccttaaaatataagtatttgagccaatgctcttaattttagcatgattccttttttatgtttttttactttttctaagggttttgtttcacacaaattaattacattcaagctttttgaaaagcttgtttgttggttggtggttttgtttaaacaaagtctgaatactgtagcttagggtggcctggaccttgtatgtagcgtgagctagcctctaattcttcagcctcctgagagctgagattacagataggagcctccacacctgctgatttcagttttcccatgagctactgtgagataccagaccctccctctccattgagtattgacagtagcattaaacctttataagataattttaaaccaaaagataaaaaactcttagctggcttttttttaaatgactgtcacctctgcagcagtcagacatgtagaaggtttatgtgtgctcagtgctgagttctaggtatcagagccttggccttgcagagggtgaggtaggtttggggaaactgctttttctctccagtgattaaagcactttcaaaaagaaaagcttgaaacaggatctggttttgaagcttaagtcgtttgggaactcgctatgtacccagcactgagctcagggttgtgaccctcctgcctttagtattgtagcagtgctgctatgcccagcagtaagacacttgaagcaaatattcttgtatgattttactcatagtgacgaataatctttagtagattttccttaaaattttagtgcacttttgtacagatgtaatccagttgggcatattgagtgtatctgcacaactctgttgaatacatcttctttgcatactgcttccacaacgaggcctcgttataaaaacatccatatcatagtaggtaataagagttcagaccagcctgacaacactatttgaagttgttttaggaagaatactgctcaaattttaaaaatatgaatatttctgttttgacacttttaggtctatatattttcaggaagggaaaatggaaaattctataatccccttagctgttttcatgtcttataaatttaagttaacaaaacaaattttcaggctgctatacaggtgtggatggattagcaaatgttttagactgtcttgagagtactgtgttttaagtacatttgagagtgccagtgggcagccctttgtgactgaagtcgtcgtcacatcgaggattttcttgggggttctcatagattgccaatatgtgaagtgattttcagactaggtgggcttttgtttggggtttgaagtgtggcctcccgaagcccaggctggcctctggctccatctgtcgctcaggatgactttgaactcatgattttctgccatctctcccggttcttaaattggagatgtgtatcacctctcccaactcctgtggtgttaaggatggaatcctgggtgtcactcctgccaggcaagtttcacccactaatgcaccccagcctcaggggctcttgcagctgatgctgctagtggttgtaactcaaatgctgctagaaagagctcttgaggaggagtttttatcctgttcttttttgattatgcattttctttatgcttgcttttcagacattaaattccttttagggtaagtgtagagagatgcacttacttaaaagatttgtaagctgggtgtgcctgcacacacctctgggcagagtctgaccttgtctacatgcagagttctaggcctgggactgcttagggggactgcactgtaattgtcccccatacattagtctgtgctctgccctgttggttggttttctgtcttgtcaatgggtctgtcactgctgaggtctgaactggtaacaaaatgcccttcctgctggcctgctcacccctgagtagagaaacgtggggtttgaagtcactcttgagccatttgctagttcagtagtttnnnnnnnnnnnnnnnnnnnngcaatggagagtatgtctgtcagcatgcagtcgggcttgtcatgaagttacaggtcgtcgggagtcttccccccttcctgtctcaatctaagtgctcagtgtttacagtgtagtctccagatctcaggcgtcacccttgctatggagacagttgttgctcctccttttcctcatataatttgtgtgtgctaagatggacacttcccagtgtatagtcttgtatatgacctactgtcactccaccccctactctgagcttccggtgggggggtggggtggggtctggaaggttctctgacttcccactctcttcaaacctctcaggtgttaacctacacaaagggactctgttgattgttcatgatgaagaatccttggtgaagggccttagctgggttctgtccatcttacagttcataggccatcctgcagggaagtcagggcggacataaggaggcagggacatggacgagaaagctgcctactgactccctcctggcttgctcagtatttttttttctctcttatgtaatgccccataggctagtctgatagaagcattttcacagttaagggtccctcttcccaaagcctagcttgtgtcaggttaacataaaactagcgtgcatataaagttttagccctgtggtgtcatggtgtatgtgctatgtgattagatatagcttctcatggagttgactgaacccaagcaatatgttacggagagaacaggtctgttctcatgcctgtgccgtgtgtttcagtaattgaaataggattctttttataacgtgtatcttctcaacgtgtgtctgctgagcagtctgtcagtagttgagtaatactatctttcccttatagtaaggacctcatttttacaaaactggggctggagagatggctcggtggctgaatttgggcgctctggaagagcagtcagtgtagtagtagttaaagcttccccttaacaccaccaataagtggtgacatcagtgaggaaaacggatggacagacagcagcagtcctcatgctcctgccacctgggagaggtctctgactgccccttccagtgtgtgcagccccgtcccttgtatgtttcttgccattgttgagcccttgagctccccctgctcagctccctcttcagtctttttgtcttacatgaatgtnnnnnnnnnnnnnnnnnnnnataaactatttcataatagtgggtcaggaagtgcctcgccaagcttctagtagtcaagtcctgcttggatcttcatggggtgcatctgctacactgtttgtggccaggcaagtgtgaactattgaatggctggatctgacgactatgcagatgtgttcagagtaacctctttccacagacccattggtaacgcacgttcttccagacagcctgttgaattgtccctatctaaagccctggttttcccttgcacaccgaagccttgagtactgcttctaaggccttgaaaatacacatcctggggctggtgagatggctcagtgggtaagagcacccgactgctcttccgaaggtctggagttcaaatcccagcacccacatggtggctcacaaccatctgtaacaagatctgacgccctcttctggagtgtctgaagacagctacagtgtacttacatataataaataaataaatctttaaaaaaaaaaaaaaaaaaaaaggaaattacacatcctttcctaactagtgcaaggaaatgagcgtacatctttcgttagttttttcaagacttattcttggtcatgaataggaattgagagtcatttcatgttcatcagttgtgtgtggtggttaaaagaagccgatgtggtggtacatgtttgtaatccccaaagtcaggaggctgatacaagtaggtagctactagtcagagctcggcctggggtatggagcaagttctcagtcagttagggcttgttatgttaacaagaccctgcctgcctcaaaacaaaacagaaccaagaaatggcgtgagggatcatctcatagagaccacaatcttttgaggctgtttttacaggagtctgagtgtatgtattggagacatctcaactatattctaggctaatgtggagatcactatgtagctcaggctggcctctaactcacagaaatcttcctggctgcgatcgcagaagtgagtctccacacctcttaatgaatcttttcactcattgccacggcagctgtcaactgtctgggcaatggagagtatgtctgtcagcgtgcagtcgggctcgtcatgaagttacaggtcgtcgnnnnnnnnnnnnnnnnnnnntactctgagcttccggtggggggggggtggggtctggatggttctctgacttcccactctcttcaaacctctcaggtgttaacctacacaaagggactctgttgattgttcatgatgaagaatccttggtgaagggccttagctgggttctgtccatcttacagttcataggccatcctgcagggaagtcagggcggacataaggaggcagggacatggacgagaaagctgcctactgactccctcctggcttgctcagtattttttttttctctcttatgtaatgccccataggctagtctgatagaagcattttcacagttaagggtccctcttcccaaagcctagcttgtgtcaggttaacataaaactagcgtgcatataaagttagccctgtggtgccgtggtgtatgtgctatgtgattagatatagcttctcatggagttgactgaacccaagcaatacgttacggagaagaaacaggtctgttctcatgcctgtgccgtgtgtttcagtaattgaaataggattctttttataacatgtgtatcttctcaacgtgtgtctgctgagcagtctgtcagtagttgagtaatactatctttcccttatagtaaggacctcatttttacaaaactggggctggagagatggctcggtggctgaatttgggcgctctggaagagcagtcagtgtagtagtagttaaagcttccccttaacaccaccaataagtggtgacatcagtgaggaaaatggagggacagacagcagcagtcctcatgctcctgccacctgggagaggtctctgagtgccccttccagtgtgtgcagccccgtccttgtatgttcttgccattgttgagcccttgagctccccctactcagctccctacttcagtctttctgtcttacatgaatgtgtctgttcatgatgcatgtattcaacatgccttcctgaaaatatgctatcttatatctcaggaactgagaacctgggtccagactttttttttttcttttttttnnnnnnnnnnnnnnnnnnnnnnnnnnnnnnnnnnnnnnnnnnnnnnnnnnnnnnnnnnnnnnnnnnnnnnnnnnnnnnnnnnnnnnnnnnnnnnnnnnnnnnnnnnnnnnnnnnnnnnnnnnnnnnnnnnnnnnnnnnnnnnnnnnnnnnnnnnnnnnnnnnnnnnnnnnnnnnnnnnnnnnnnnnnnnnnnnnnnnnnnnnnnnnnnnnnnnnnnnnnnnnnnnnnnnnnnnnnnnnnnnnnnnnnnnnnnnnnnnnnnnnnnnnnnnnnnnnnnnnnnnnnnnnnnnnnnnnnnnnnnnnnnnnnnnnnnnnnnnnnnnnnnnnnnnnnnnnnnnnnnnnnnnnnnnnnnnnnnnnnnnnnnnnnnnnnnnnnnnnnnnnnnnnnnnnnnnnnnnnnnnnnnnnnnnnnnnnnnnnnnnnnnnnnnnnnnnnnnnnnnnnnnnnnnnnnnnnnnnnnnnnnnnnnnnnnnnnnnnnnnnnnnnnnnnnnnnnnnnnnnnnnnnnnnnnnnnnnnnnnnnnnnnnnnnnnnnnnnnnnnnnnnnnnnnnnnnnnnnnnnnnnnnnnnnnnnnnnnnnnnnnnnnnntgtgatagaaatactctataatagacattaacccctggggggaggggagaaggtgggatgtgatgggaataccctataatagacattaacccctggtgggagggtgggatgtgatggaaatactctgtaatagacattaacccctggggggagggaagagggtgggatgtgatggaaataccctataatagacattaacccctggggggaggggagagggtgggatgtgatggaaatactctataatagacattaacccctggggggaggggagagggtgggatgtgatggaaataccctataatagacgttaacccctagcttgtgccaataaaacatgtcagccttggttattttgaattctttcagaggctcaggcagttcaaggcctacatagtgggttccaggacaaccagagctgcacagtgacaccctgtctcaaaatgaccctcccatcccccccaaaaaaacagtttacaaaaacagatattaggagttaagtcagatgggatttcagagccgccctatgtcagccctgagtgcccagcttccgttgatttcccacccacgtgtcctgtgcacactactgagcacactgggaagggagtcaagcacaggcacccccacacaatgctgcctagggacgttaccccatgtgacacgacagcagccactcttccagaacggctgtgttgtcatcatctttaacgtcgaccttgaacaggatttgaatggactgcagagtaagaactgctgagattatttcatgactgaatcacagtcttcagttttatgaatggggagaatttaagtattcctcacagagttgtcggttttcttggtttggttttgttttggctggggttaggcactcgggtctgaagctggagcgccgtgtgtggtactcacattggagcctgcttaccacctcgctgctttgtataattgttctgacatgtctctattcttagttgtacatatatttctaggtttattatgtctgtgaggagagggaaggaaagatggtgaatgagagtgagagatcagaggacagcccttctctccttccactgtgggttcaggcagtgaattaaaatctgcaggccttcacaaccactgttccctcaaggccaaatatttggttgcagaaaatgttttctttcttagtttgagaaacatttgagcaataccattgacagtaagtggcactcacattctctgcaggtctgattgagaaagtgcagccttcctggctaccatgtcctttactaggtgttgggaccaaacctggagtgtcctgtgcgagcagtcctctgctgtcgtgaattatgcctccagcccctgtatttatttttaagtaaattagaatacccctttgatgtctcttctcaaccatagtttaggaccaggaaaataatcaaattttatactatcacaaacctccaagaatcctggtggcctaactggtgttattagagccacactcatgtctccttttagagtatctgggatgaaattcaatagtgatctgatctcatttgttctgatgactttcatttgcacttcccatattatgtatcttcagacctttgaatgcagaagtgactgaagtgcctttccgctgagggtttccatagagacaggtgtgtaactcctgggatgggcaaggtgaagagctatgggactgggagctccacgctggcctgccgagattgtgtaggtcaccttgagtaaagtctgtcagcctgcacattgtcggccccaggtgtggactcaggagtagaaagggtggctttccgtctgggtttctgaattcatggtgcccatgtcactcagagatgaagagcatcatagagggccactgaccatgtgtactgcgggctccgggttacaagctggggctgtagtaacccatgcctctgcatctgtaccatgtttaccttgaagtaaacggcagtcaacatgatagtaagaggagcactgagaggcttgttaaattcgaacccacctgagcagctccccgggagctgggagagcatgctcacgggctcgctgcagggacctgccttctcactgagggcagaggttcccaatggcttgctcttccctgatgacattgacatacatgccgtgagccaacagacacactgctcacactgtcctcctgtgtgggttccatatcccaccttctcccgataagagatcggggtggaaatggagctggagttccgaggaaggagcacagggacagagccacactgtgaagtggggacagcgacgcttgggtagttaagctctggcctttacctccagaactatgctctgttattagtaaacgtcctagttctaacatagggacaaagtctcaacccttctgccctgagatgaatttttgatctttcctgggatttcagtaagcccctgctgttgtctagggtactgtattaaatttaatcagtaagatcaaaccctttcccctgcccaaaaggcttaaactcacagcacacttagccttgcagttaagcctttgtatagaatagcaaggatataatgaaatgtggggaccatttttggcgcaatagagcaggaaatggacctgatgctgacccaaaaatagaagctaaattttcagccattgtgcctcggcagaaaatgaagcaatgaagcatcttgaagaggggcgccaaagtgcagcggcctaatggtttcactgtcaaggaagtcctgactgcttaggactatgggagtcttacacaagagtacagtcaactgaaattgttacgtaaaatcgtccagaataaagcagaactcagtgctgataggaatgtaggccgagagagtcttcggtattctccgctgcaaatggcctgaggatggaggtaaatggacttaagcttttggtcaaattctgactctgtggtggtgtctgtgctgccacctgacaggcactagagtgctctgacaggggacactcatcggccagctagtctactcatgctgcagtcaagtgtgtgtaatgactggagctgttctgatgccatggcctgggccaaacagctggattctaagctgagctctgggaacccccagattctaagctgagctctgggaacccccagattctaagctgagctctgggaacccccagattctaagctgagcttgtgtgaagaggctgccgccaccgccaccgccaccgccaccactgccgcctagctggtgctgcttttcagctctcaagaggcccagtgagtccttcctcctgttttctgaccatgggccagtagccgcctttatttttcttctgtggctttggtctgtatggtcttggagttgagtccacgaacctcttattctaggtcaaaattacattacctcttttggcctttctctatatttgctttataaataaattgtcctaaacaagtttatcagaggaaaattagattgttctcttcataaatttgctttctctctgtaaatgagtgcattaggagtttcttatggagtaatgattttcctacaaaacttaaactgcccagtacattggtcacattttcaagttccctcaaatataaaccacatacattttcatcaccgtatctgttccagaaactagatagcccagaaggcctgattgcaggaacagcaggaagctgagctgttaggatggatcttaagatggcagctgtgacagatagcacaaggcactgtagattgacagatgctgaagcagcactccagggagcaaacaggagtttgccacaggacactcgctctgtcatcgcatccttaagtgcaggtcagggcttcacggccacatggagggacaaggaaaccggagtctgaccaccgtgtttccgtcagaacggaggacagtaaaagagaatctgattggtctgcaggaagacctgacccttgtcaactcctgataaagacttgtgtgcttagaattctaattcagttatcattaaaagttatcttaactcaaagaaaattattttacaaaggctggggaaatggctcagcaggtaaaagggcttgcagcttaaactgatgacctgagctgatccccagaacccacataaaggtgctgagagagagccacaaaactgaccgtgacctctgagtgcgcgtgcgcacgtgtacgcgcacacacacactctctctctctctctctctctctctctctctctctctctctctctctctctcataaataagttaaagtgacttttgaaagttattgacttttccttcttggaaatgggtacacatttctgtgggcaagcctcagggagcctacatttgttgcctgtctgtggggttggtttcttcttttcttttctgtggaccttaataatctgctgtccattcattaacaaaaattaggggaaatatacttggtggttttttgtttttggtgtgtgtgatttcatttttgaaccagctatctcacatatagctctgtctggcctggaacttgctttgtaaaacaagcgtagctttgaactcacagagatacggctgtccctgcctcccagtcctgggattaacagagctcaccatcagctattaactaatgtccttgcactcggggctctacctgaaagttaattcatagggannnnnnnnnnnnnnnnnnnnnnnnnnnnnnnnnnnnnnnnnnnnnnnnnnnnnnnnnnnnnnnnnnnnnnnnnnnnnnnnnnnnnnnnnnnnnnnnnnnnnnnnnnnnnnnnnnnnnnnnnnnnnnnnnnnnnnnnnnnnnnnnnnnnnnnnntatagtagcttaccttctgggtagtgtgggcttctgggcttctgagcagatcacttcatggcctgagctggcactggacttgttctcatcagcctcctaaatgctgccatagccactcctgactttcccaatcgcgcctttgatcccagtactcgagagggagaggcaggtggatcttccaggacagccaccagggctacgcacacacacacacgcacacgattcattacctacccagaatttctactagatgaggagaaatgcaagccaagacaagaatcaatagaggagatagttaactgacatattccataagggaaaagcatagcatatttcatagtcataaaagtaggaaaaggtcactctgcgtgtgtgtgtgtgtgtgtgtgtgtgcgcgctcgtgcacgcgtgtctgtctgtctaggcaaggtatctctgtagccttgactatcctggaacttctgcagacctctagctcacaaacccaccttcctttgccttcagagtgctgagattaaagacatgcctagccccctcactttctgatatttttagtcaataatctaataaatacattcttgaacacctgcaagaatagaagtgcaagaagtctcgtgtaaaatggaatgtaagcttaccttttgggaagctcaattgggcagtatttagcagaatgcatacatgaaagggatgaggtgtgtttagctttgttggagtgttcagaggccaggagagagcaccaaatcccagagctagagttgcaggcagttgtgggatgcctggcccagtatgcgggtgctccctccgttctgcaggtttgtgagagcaggcactcttaacctcctgggccatagctccgccccaggaggagtttccttaacaaataaggcgaaagggacgcatctgcccagctagcctgtgcagtgtacagatgggtgagtgtgcctgtctgctctgatgatccataggacttttgcagacgaagttcacggtgggggttgggggtggggggcttagttgggatgggccattaggtttcaattgtttgttctagttgacatttgtgtcttggaactcattacttggtgcacagactttttcttttcataaaaaggaatgctgtgtacatgtgtatatcataaagcatctaatatctgagcatgctgttagcgtgcatgagtgcagtgttctcccagcacgccaagtcgctgaacatcacaacagacaactacacacgttttcagtaaatgttctcagctgtctcctcatgtgatagcagcagtcgactgcccagatcatgggcatatttattacctcacagagaagtagctcagcagttaagagggcttgctgcttttccagaaaatctgagtttggatcccaaacaagaaagaagcccggtaccccacaaatgcctgtaactccagctccaggggaccaaaccatctcttctgctctctgcaggcactgcacacacatggcacacacagtatgcacataaataaaaagctgctttattgttcatcaatccctgcttgctgttttacaggcatctagacctcaccaccgttctcctgccttctcaccacagttccttgccagccaggccccttctcacatctccctcagttctcctgcttcctctacttaaaaaggcctttttttttttttaaatccattggtgttttgcgtacgtatgtgagtatgtgtgtgtgcatattggattccctggaaatgccacgtgggaactcaggtcctctagaagagtagtagccagggctcttaacaactgaactgtgccctcccccccccactcccaaccccaaaaggccttttgattacatggtgtctagtttcctattcatccaaagatacttcattttaccacataatcaagggcactttgccacacaaaggtttgagtcataggggtcaatgtcatatgaacattttgggcgaagatttattgtgcatagcacactgcaaaggtgatattaatatggaaatttaaaccactaattgaatatattgttaaagtatcttcattctgttggcctcagcatccaccttcagaaacaattaaaagaaaagtaaattaaactcaaatgatgggggaaattacgctaagattagaagtaaaatgtaaactgaaggccgttagtgcaagtaccaaccgagctccctcggatgccatcgctccgacagccctgtgagcagtaacggtgaagcaacgagagaaaactcagtgtgcttacttggctgcttttgggagagcagaagtcctgcctttcagccgagtccggtagcttcttctctctgtctttcccagtgatccatcatccgtgcgtcgacgtcgtcggcctggttctctggcctgattctcgaggctcattcatggcttcactgtgtgtgtggttgatttggttggtggtttggggggcttgttggttttgtttggttttggtaaggtcttaccttgtagccctggttgtcgtggaatttgctgtgttgaccaggccagcctagaacttgcagccagccatctgcctctgcccctcgagtactggaatcaaaggtgcgcaccgtcgccccacagactccattgtagttctcttctctcagcttttccttgtttcctagagaaattgacagcttttcttttctagattcctatgggaatttctaaagtgaaaaaaacaaaatgtcaagggtgtgtccgcagccaaaaggaacccagtcgaggcctgggaatgtgaggacgctggtatagtgccaactgaagggcaggggctgagaagagacctcatgtgaacagaagccctgtgggaagaggagggggaagcccagctgtctagggtgggaactcccagagaattccattactggaacattctactctgtttatgtataagcctgtgacaatgcccttggtcccacctcagccgtggtaaagcacataacacagttttgtgtcacttgggtcctgagccctggactctgtgcacactgtcttcaaactggaggatcagtcacagagtccgcagtgatttgaaaggaagaaaaggggcctcttgtaattcatactttctccgctggcagccgtactctcttcattctcattatcagattgtggcgaaaaagtaaaatctcttcacaatctaaaaaaattcccagaaatacagaaaagcagcaaaaacagttttatcattgaacaaacataagtgctggaccgagaccctcgggcagcctggactcgagagggccaagttgccgagaactgcagctctgccttcctctccaatcctcgactgaaaggcaaggacaggctgggtgtcctcctagcgcctcaatccctctgcttgtgtctatggaaggagtgaatatgaataaaaaatcagtttgacgttgtggcttcttattccatcctgtgccgatagcaattggctggaattaccgtcagtggtaacagcagtagcggcggttggctttttgcaacaagccttttctgtgtagtccaccatggctttgaattccctgggtccacgctggtcttaaacatgaaattctactaccacagcttccacgtgccatacccctaaactgtatttcttctgtcttcagccgtcttgtcatgttccaacctagttcatctgaacttctggaaggttcagcagctgtcagttgcttttattctaatgaaaagcagaatctgggtctttatgacaggcaggcaggtagttactagagccaggctccttcctgcatgaagagtcccattgtgacaagagagacggtggagctatggaggcagcctctggctctgagttacagggttgataaaaatacacctcccagggatggagatgtagcatgggttctctagggcagtgcagacacgtgactgcctgtagctgcaggcggagactgttgaggttctaggacctgccactcagtggcttggataaaccctgccaggcttgttgtgggtgtgaaattgcaaacctgttggattttatattactttggacttccataggctagtcaaacattttattctgttcttactttttacattttgcttattttgtgtgagtgtgcaacacgctgtatgtggctgtcaggacatagcttgtgagagaatgtgttcttccaccttgtgggacctaagaattgaactctggtgtaaacgtaagttttttttttttttttaagatttatttatatgagtacactatagctgtcttcagacgcaccagaagagggcgtcagatctcattacaggtagttgtgagctaccatgtgtttgctgggaattgaactcagtacctctggaagagcagtcagtgttcttaactgctgagccatctctccaggcccataaacgtaatttttattagcctgatataattgtcctcgctgaggcttactgcctccatttgctaacctaggcctagtcccgggagcttctagcctctgtacaattttatccagatctagagtggtccagcctcggacacttcctgctgataagctcaccctttctacttctttttgatatctgttgactgcttaaactcagctcttgtggctcaaactcctctgcaagctgactggttcaatctggcttctctctcagcctctgactgagttgctctgcttgacctcatactaactttggcaatgtgatctaatcttctggctccttctcgttttctggtttggtctgtcttcaccctgtctctgcacaactgccctgacaaactgcctcctttctcctttttgcaccctccctcagatagcttccctttcttctctcatgagagtcgggcagatcctattctgtcaaatctttctctgattcatcacttgtgtgtgctgctcaattagacatgggtgcttctttctacaaagtaactttcccttcattgtttgggtgtatactaagggcatctgtattccagccagagggattaaaggtgtgtgctaagggcaccacaactagaaatagtgcttttcagtaactaacacaacctcacagtgtgatcagtcttgcaacattataatcttcagatacccccagaagagggtgtcagatctcattatggatggttgtgagccaccatgtggttgctgatatttgaactcgggacctttggaagagcagtcagtgctcttaacctctgagccatctcttcagccctggtcatctgcttcttaaatggtcttaattgaatggctcgaatccttagttttgtcccattagcatttttatgggttttactatttagtttaagtttaaattatgtttttaagtttttaattttaagtttcagttatgtctgtcatagagaaaagttacttccccaccaatagaatgttaatatgaactttacagtttaacaacatttagtggagtggatatgtaggaaattcagtagttcggtttgcacaagggggctggagagatggctcagcggttaagagcactgctctttcagaggtcctgagttcaattcccagcaaccacatggtgtcttacaaccatctgtaattagatctgatttcctcttctggtgtctgaagagagcgacagtgtactcacatacataaaacagatctttttttttttttttttaaagtttgcacaaaaagactagtacagtaatgatttagattcttgtttaaaattcaggtaaaaataacccaactgtaacataaacatgaaatatatatgtagctgttattttaaatattaaaatgaaaattggccaaaatgtctgtgatatttcaggctaagatggcttccagctgtctgttccagcacagctggctaccatagtatgatctgctccagtccacgctccgctcctttgagcggtttgcctcccagctcttgtccgacagtttgagaagttcgtgctgtgaaatgaagttggtggtgggatttcctcccgattagttctgactcatttggaagtggaatttggacaagtttggagacgctgcagaatcctccaagcagtgtttagagagggctgtttccatgttagcggagaaagtcggagcatgggtgttctagctttggtgaaggaggaaaactggagaaatgtatggcttcaaaatggttttacaagccccgagatgcgggtcttattcaaaggttcagtctgttagagcaagtttccaggcggcttagctgactagagtgagaactaggagctaaagccatgctggattccagagcttagagagcaagagccagagattggatcctcacagcaaaaccagagccaggccttctctgcacttgaaatgcagcggcaggcagacgtttgaaacctcagggccagcctgatctacacagagagttctaagccaactagaggtacatagtgtgagcctgtttacggggtggagaggaaggaagctgaccaagaagccaaatcctttctactgagacgatgggaaggtgtcacagggcgtgcaacggtttgcccgactcacctgacgcaattcaagacagttgttcgagtacttgacgcaccccgtggctctgactgatccttcgtggtgtttcccacacaccatgccatgccagtgtctgcttcaggtgctgggcacagctacaggaaggatggagctttgctctggcgattcccagctaagtgtctacgttgagtctcaaaatagacttggagctattgctgctttggtgatgcgtggatgggctttccatgtgtgatgtccatgcactgggaggtgtatctgtgggacggtgacaggtagtgggcctgaggtgctgggtatcctgagcttggtttgccggagaagtacctagaagaggagggaagcggggcaggagagatggctcagcagttgggagcactgactgctcttccaaaggtcctgagttcaattcccagcaaccacctggtggctcacaaccatctgtaatgagatcagatgccctcttctggtgtttctgaagacagctacagtgtactcatataaataaaataaatctttaaaaaaaaaaaaaaataagagtagggaagcatgctggcgggttttcctttgaggatgtacaagagagaattacctattcctgataacatttgccctgtgtgcacctgacagtaagcaggggccatgatggaacaaagaggaacgaagaggcagccaggacaggcacacgccctgtgcccctgtgccctgggcggctgtgcccctgtgcccctgtgccctgggcggctgtgttttgtgagagaaatttcttgctctccctgccctctgtcataaagcccagacccagcacctacatggtggctaacagtctttttttttttttcaacttgaatttcgtgggatcaggtgccctctttaggcctccacagaaactaggcacacacagagtaattacagacatacatgcaggcaaaacactcatacataaaaatggaaatagattttaaaaagagaaaaagaaaaaaaaaactaaacacgaaccaaaataactcctctttcaaaccattttgctctggtatttggtcatgtcaggtgaactgcctgacgtgatccgagaactgaaaggcacaggtcagctatctgaagccaggattccttcctctaaagacaagacttgacttcacctgagagctccttgggatggggatgtgccaggcttttttttttactcttcgccagatctatgagagagccaccattatacagtctttcttaatggcttttggggaaagtcattaatcatgaacgggaggccaggcatggtggaggataggtagacccaggttactgtcagctgttcagaaaggtcaaggctagctcagctgcatcagactgcctcaaggtaataacagtaatagtgaagtgtgggtctaataacagtcaacaaattatggatttttgttgttacccagcccttgattccaaacccagtggttatctcctaggttttaagaagttaggtaattttttttttttttggttttgttttgttttgctttttgagatgatatctactatatagggttgatggcctagaaatcaccatggagacaggctggcctcacacagagatctgccttcagagtgctgggactagagcactatacaacacagggctaagacagttattgctgcaacagtagcagcttggctctagtcaagccaagaagagaagtaaactaaagctgcctctatgcacccacaagcctgttctctggcttccataggtaccaggaagccgagtgtactgtactgctttgacccattcagtgtgacacaacattatagagtctgaagtctatgtctggttgtgagttaagtgtgggagagcgctagacttgatgcagcctctgacttatattcaaagcctccagagccttccaaaaacccattgattagttcctttattccatggagttttctgtaggcatgccaatgaattacttcacgaaaagagctccggagaggagagagtgggtttcctttgaccacatcacagtttccagaagcataaaatgatgacgtgcaggttgcttgtgtttgctgttttctgttattgattatgtacacctgtagaaatgtctctcataggcagcagctggggatctcccagctcctagactaggagcgccagctttcccttgccatatcccagaatatcccggtgcagctcttctccacagatcttctgttgctcagccgggcttgttgagcatccgccccgcagaggtctagcagagcagcagcctgcaatggtgtttaactgtagagctaccttcaccccagttcagtgtcctgtgctcagtctgtgtcttctcctctctttgaacttcttttccttcatagctaattgcttctcacttccattttgttcccatcccagctcatgcaaaatggactccacccaccagtcagggtaaaagagggccagtcctgaggtgtatctcttacagggatgtaagttctttctttcattcacctcccagctccactgaagagatgctctccctcaggcagaccacagacagtagctgactgtggtccctgaagaaagaaggataaagataaattggcttgaggtttgtgatcacagatctatagtgtttgtggcatttctgtgatggtgaattaatttttgagagctttgaatgtcccttccttttccttgtcccctaaagagtttgtgtgctaacagtcttctgctctggtcttgcatattctggttatgtttttgttacgtggccttccttgattctcccgcccatcttccagccacttctgtcctatctgatggccacaggctgccttgtgtagtgtccctatgtgatggccacaggctgccttgtctagtgtccctctaacgtttgctgcttacccttgacacttaaactgtagatatatcatagatttcatatccacggattgactaattctgggagatctgtaagtcggatgactacttttaaatctttttggctgagttcctctgcatcaccaccaccaccaccaccaaaaacaaggcctttttgaactcagtcttccatttaaaattttgatccaatgaaatctacggaaaaattaacttttgtcagttttccccagtaccatggaatccttggccactggtgttgatgttaactgaaggtgggcattggtcctaaccgcctgccctagaaaaccttacagagggcttttggagcctgatcctgaacaaaatcttgtcttagctaacctcatgcttaaacttcatagttggcctcagcaggggattaagaagtgtccctggggctgcagagatggctcagtcaagagcattgagtgttcttccacacgtcctgagttcaagtcccagcaagcacatggtggctcacaaccatctgtaatgggatctgatgccctcttctggtgtgtctgaagacagctaagtgtactcacatacataaaataagtaaataaatctttaaaaaaaccaaaagttttaagaagtgtccctggttaagacgacactgttgcctggtaggaccagacccaggcttggacttctctcccacaccagtctgtgctgtcctagtctgatgcgctggcaaccccagggtttccagtctggaaatgcatgtgcaggtgaatcaggagctctcaactctgaatttggggactgagaatggtgacataaacctttagtcccagcggtcaggaggcagaggcaggtggatcactccgagttcaaggccaacccactctccatagagttccaggccagtcagtgcttcgtattaagatcttacgtcaaaagtcgtccgccgaacaaaactgtagattctggctgtttagatgagggatgctgtgtctcttctgagtcacacgccaggttctttgtgccacactggagtaaccaggctgccggtgcacatctgagtttgcggctagcacacttacctttttggcagtagctggactgctaatgaaagtgttcccatggctttcgtttgactcctggctgcaggtgaatttctgtgctgctgggctagaatgcaaagatgttttagatctactaatccccagcaggagtgcagaggtaagtaaaaggactggtcttgtatttcagtgcaaacagctaccactgcgccaaagtcctggaagaaaacaaaagagcagacccgaaccccagatgaagtgttagaagcagaggcagaggtgagtgaccgtctctcctgagacacctttcttaagtaacattttccattccgatcttggtctgtcaagcacagactatgtctacgggttttgtttgtttggtgttttattttcctgaataattgttgctcctctttccaaatacctcttctagatagtcaatgtgtgtagttaattctacctacttgaaagtgtgtgtgtgtaggggggttatttttggctttatttgttatgtgatatttctatattggtatggatttatgtatccagttatatgcatgtgcattgggtgtgtataaaccggaggtcaatgttgtgtgtcttcctctgtcattgtcaactataattttgagaccatcatcactagttgctaaccctggagattagttagtatgttggttggtgaactctagggatatgcctggctccttcttgagttctggggacccaaagtcaagtagttctttacatcttgcacgtagtcatacactttaccaacaggctacactcagtcccttagctcccactttcttatactttcctgaaagtacgataaaaatgacattaaaatagagctattattttgggcatgctgtactttgctaatgggtaaaggaaaaggattgcttacaacttgggcctgaactgggaagagaaagtctcagccttggagaatttttcagttctccattgaggcagttttatttatttgtgtttgtgtgactgcacttatgccgtggctcatgtgtcaaaaaacatcccgtggagtcatttcttcccttctgccttcatgtggatcctggggatccagctcaccccatcagctttcaaggtaaacattatctagtgagccatgctgcctacggcagatttgaaatcagtttctgatgagctctttcgagctaataaaaacttgtgtgttgttcacttgtctaacagtatcttttgttgcttcctctgtcacgtcattttccttccatgatgctctgttgatgtcacagtagttgcctagcaaccactaaagaggtgtgtgagtgtgacttcattgtgcttctgagggacaagatttagcactaagtttgagaggtgcacgtagtcggtgcctaccttgaagcttgacaagaagatgatgttcctacagagaataagatgcttcctagaggcaggggagtcgcacacagtccgggtatggctcgctcttcacaagtagatcctgttgagactcggctgggtttgctccattcactttagtttccttgttgtcttttgtgctctgaccccatttctcagagaatactgaatggatggagcacccaccattcctgtgcccttccttagtgtggaggtctccagacctgatcatttcaggttgggatagtacatacttgaagtctgttgttcctcccacaactcctcaggcctggcacaggaggcctgtctgtgggggaagtgtggctgtgtcccagtaaccttattgatggccactgacatttgaatttgcatataaaaaaccacatatctttattgtttattatttattttggtttttcagttattgcaaggataaaaattatccttaacttgtccaattcatgaaagcagttggtaaagcaggaccctgccttttttttgctgtaaccctgttgtagcgtcatgaggctgtgagagatgatgagattccatgtgaagcagccactgccctacgtaccacacattgtataaaaagcttacgtagcaaggccaggaaggtggccacatgagtcggggtggctgctcctcacagcacctacacaaggcccctagcacccacagtgggcggttcttagccacctagaacttcggtcctaggggatctgctgacgtctggcctccgtgggcactgcactaatgtgaaaatgtgcacacataaatgatatatttttacaatacttaaactattttctcttttttatgtagtcttcactcagaattcttagttctgagccttccctacaataatgctcattagcacagtttattgaatactagatacttttgccctaatttccactatggtctctttcctactttattttctcagcctttaaaaataatgcaatttgggcacatcagtggtcaagtgtgcctttaatcccaacactcaggaggcagaggctagtgggtctctgagtttgagccagcctaatctacagaggcacttccaggacagccagggctctacatagaattcctgtcttgaaaaacgatggatggatggatggatggatggatggacggacggacggacggacggacggacggacggacagacagacagacagacagataatgttcagtccttttcgtcagtcgctggatacccgcttttcattctgacttttctgtgattggtagggagtattaataatagtgttataaataatattagtgacagtgttataatgtattcttttttaaagttttttatgattcatttatgtgcattggtgttttgcctacatgtgtgtctgtgtaagggtgcgaaaacccggagagctgaagttgcagacagttgtgagctgccatgaggatgctgggaattgaatctggtcctctggaagagcagcctttcctcccttccaccccatcctccaccctcccgagtttcttttatagccctggctatctatcctagaactcactttgtggaccaggctagccttgaactcatagagatctgtctgcctgcctctgcctcccgagtgctgggattaagaggatgcaccgtctctgcccggcccataatgctgttattttgtctggtttattttttctctctccctttcttaggggtagccctggctgccctggaattctctctgtcaaccatgctggctttgactgcgcaatgatgcagctcagccctgctgcatccgatttgggaataaacggttgagttagcactgttcgtagacttcatgaactccgttttgcttgttgagtttttattgggttgagtcttgtggcattctgtggctctcctcagtgattctgtgtggctatgctccccacaggcaccctgtgcttcctagtgtcacctttctttctttccctgttggttccctgctgctggttttaggaaatggcttcacccccacattttgcaaggtctgaaggaaggattttaagaactgtgatgcgcttatttagctctttagtgctgtaggggctttggctcttctgggtgtcctgaggtaccatggtccttcctgctgaaatctgtgaagtcaagaaaaactgtcctcacccatctgctctgaatagaaaagcgcacatccagtccttgtcagtttactcagagcatcctggatgctgggtccaggaaccgcaggccagcctctcagcggccttacccagtcttcttttaccaaacgttgaaagcagcctacttttctttaatatatatacatatattatatatttatatttctaggctttattcttggaatttgatgtcagcatttgaaggttttgcttgccttttttattttattttatttctttaaatttgagacgatgtctcatgtatcccaggctagtcctcaagtggctatacatgcttatctgctactgattttagaaaatttgctatgtagcctcggatggccttgaatttcgtgtgtgtgtgttgtatacacatacaagggtcattcagtagggtttggttcttttcttctcctgccttgtcatctggagagcaaatcaggttttgcaataagtacttacctttgctcatggccacaccctgcctgtctgctgtgtcagcttttactttgttgcgttggccctcggcttgtatagaagcagattgcatgtgaccagtctgtctagcccagactcaaacttctaacccttctgctccctcctccctcgggctgaaatttttggcctgagtggtttctttgattaaatattaggggatttttccatctttcttcctcttatatgtcgcttagaattaaacccaaagcttggtcataggatgaccacctgttagctctataacggttgccttgtttttcttttttgatagcttgtgtgtgtgtgtgtgtgtgtgtgtgtgcgcgcgcgctaggatcataggtttaggtctctggattgcgcgtatctacttgtaagactttaaaatttgtgtcttgttatctgatgtattgtaggaacacattgctcgtatttttacatgttaaagaagatatgtttgagattacaaaactgtgtcataaatggggtaaggtaaagcttgctatgtgcaggacagacttcgcacaagactgtagcgtggtgctctgctgcattcgcgcactctgcctcacctgatccacattaaaatgctcgagtgccgtggatgtcccatggtgctggttgggtaggctcgtcttcagagtgtcccctcagcagacacactttattcacagagaacccagatgcacacccaggccttcaacatcccacatagctaggaggtgattccgtgtctccaagagacagtgctgtgaggagcttttttgtaagtgatttatgtgtgtttctcatacacggtcatggtttcagtcaagttaatagattaatgcaaagaggaactgtggtctccttgtaaagtagaacatgattatcatcgtaagacttttaattctttaattccccgaaactctgtttcaaagctggaggcctgcaggcctctgtagtctagcacctcttgcttgctgaccagctgtgtggcacggtcatgatggctcagggttctgagcaggactacacactcacttcttggccatcttctttcaagaactagctgtcctttgctgcgtgtacatagtagcgtgaggtagatggatccatgagttccagcctggtctacacagttgagttctagggcagccgggattacacaaagaaaccctgaaagacagagcagtgttttcatgctaaccttggctacattgagactccattcgtcacaggtgagtgccttccagtagctgtctgaaccctgtgtcacgtggcaggcggggagatgatttaaaacttgttgttctcgtgccatgtgctgagtgcagacgctgtcatcttgagtggcatgctttgagtgtatattgcatacagtatacaatatttatgttgtaatgtgaggtccatctttccttgcactctagcctaaagccgaagaagagcttgcagttgacagtgtccttgagcctgagcaagagaagatgagccaagggtttccgtctgagagagacccctctgccctgaagagagggaaagctgaggaaggaaacggagaagaggctgagcctgtgcgcaatggcgctgagagtgcttctgagggggaagggggagatggcaactcaggctctgccgacagctctgctgatgggctcaccttcccgtttaaagcaggtaagcgagctgtccctggcttcccgtgtcccttcnnnnnnnnnnnnnnnnnnnnnnnnnnnnnnnnnnnnnnnnnnnnnnnnnnnnnnnnnnnnnnnnnnnnnnnnnnnnnnnnnnnnnnnnnnnnnnnnnnnnnnnnnnnnnnnnnnnnnnnnnnnnnnnnnnnnnnnnnnnnnnnnnnnnnnnnnnnnnnnnnnnnnnnnnnnnnnnnnnnnnnnnnnnnnnnnnnnnnnnnnnnnnnnnnnnnnnnnnnnnnnnnnnnnnnnnnnnnnnnnnnnnnnnnnnnnnnnnnnnnnnnnnnnnnnnnnnnnnnnnnnnnnnnnnnnnnnnnnnnnnnnnnnnnnnnnnnnnnnnnnnnnnnnnnnnnnnnnnnnnnnnnnnnnnnnnnnnnnnnnnnnnnnnnnnnnnnnnnnnnnnnnnnnnnnnnnnnnnnnnnnnnnnnnnnnnnnnnnnnnnnnnnnnnnnnnnnnnnnnnnnnnnnnnnnnnnnnnnnnnnnnnnnnnnnnnnnnnnnnnnnnnnnnnnnnnnnnnnnnnnnnnnnnnnnnnnnnnnnnnnnnnnnnnnnnnnnnnnnnnnnnnnnnnnnnnnnnnnnnnnnnnnnnnnnncacattggtctacaggggtgttggagttgcaaccagcgacctgaagactggctaccccttgctctggattcaggggttttgtctttcccctgactgaacatgtgtaaggaccagcagctagcgtgggtgtgcctcacagtgaggagttacgcaggattagtgagatcagagggttgcatagctaagacaccacggatgccttcgctccctgacctagtgggacgtagctctgtctccagcacttcagaacccaaatcacggactggtggttctgcaagccatgattgctatgggctgccatggagggccatgctgtcagtatgtccagctgtgactccttggatatgctctttgggctcagtggaaagtgtttttcctgtaccagtaggaagtaatgttcatcaggcagactctgagtgtaaaagcgccaggctggggataatccaggccaggaggcttcaaacctgtgagttagttccatttgggggctgttaaattacagagcattgagcagtagtaccctgcttaaagaatagcaatgaaacaccatttctatgatttcctgtaggaagagaggtgtagccctgagtcttctatcagaagtcattgtctccctgtgtggcccagcgtgtcagttcccctgcctcaacctacagaggaactgttacaggcaatttcataactgtatacaattcaccctgatccatcctgtcgctgcctgaatcctctctgaaatgtttttgtagtcaggaatattggggaacccctgacctatacttcccacattgaattactaattttttaaattttggtttaatttcaaatgctgttcttctgagctgtgtcacagccctgtttgacttttcaacaaaacccactctgtaccccaggctgaccttgccctgaaatcctgtgcctcagcctccagaagacctgggattccacatgtgtgccactgggcctggcctgtcgtgtaagcaccgctacccgcacttgatgggcttgtctaagtcatagtgttgccttcttattgcacatcgactgtagcaactgttaagcaaaacagtcttgtatagaaacttcttttttacacagtaggaccagtgtctcccagcagatcactaaacgctggtagtgaccgccagccttttcttcataattgtgatgacagtgctgtcattcattgccaagtgacagggtccagctatctagtggccatctgatttcctttgaccttgtaatccttgtgtagcagtaacatcgggaaagggatagtttaaatcctaaaccccaataagttatctactttctaacaaatatgtatgacagggttggtttgagaacatcttcataatattaagagagtttcttggggtagaaaccctaagaacacagggtccagcctgctaccaggacatgattggggctacgaatttcacatataaattttctgtaatgaaagtatggctagggtgtcttgagaaatggctttgcccttaaaagcacatactaaccatgcagtagactagagtctggttcccagtctccctctcaaacagcttacaagtgcctataagtctggctccagggatccatgcactccgggcctctgcagccactgctctcagtacatagctgaggagctggagaggtggctcagtggttgggagcactggttgttcttccagaggcactgagttcaatatctagcaaccacatggtggctcacaaccatctgtaatgagatctggcgccctcttctggcatggatgtgtacacgcagctagagcactgaaacataaaataaataaggtttttggttttttttttttaagctaacatttttaaaaatagaagtggggttaaatagttgatagaacacaaacagaggcaagccagattcttgtggcaaaatactagttcaaaatttgtaataaaaataggagctaaggccaccctggtggtccgcactgtgaccctagtgctctgaagctgagctccatagtaaaatcctgtttccaaaacgtaaggccacaggtcaggcttcctctctaggatccacttagtctcttcaaattagactgaaggcagagacgaaagtcctctatctagctgactagactttcattgtctgaaaaaaactattttttattacttttggtttttttctttaaagtagcatttccctatgaacaaccatgtggctaaccttgtttcccctgaagctaaaatcttgtctggtttcttatttctgcagccttcctggcttgacagtccttctatgtccttgagagcctggatggcggggtggtgatggatcccagcggtagggaggcagaggcaggaggatctctgtgtgcccaaggccaaccttgtctacagagctcattccaggacacccaaagctacacagagaaactctgtcttgaaaaacaaacaaaagtgagcctggccacaggctctgaggagggaggggagacagtgctgcctccaccttccttccagtcattatatgtagacgtttggaatctattctttatcagctgtcaggatgcctgtgctaactttgatgcaggggcctcacctggccttagggaaatgagctgaggtcaggcactgtattgaatgaaggccagtagctggtgatctctggccttatagctttctctgactgaactggatgctgttagcttctggagatgtgacactctagcttattctgtggctgaaaaccactggccttggagattaacacatgctgtatagcagacagctcgccaagagccctattgcagaccaggctagttaactccttgtgaaccagagaggaaagagagtcacacaggaaacccacccattggatgaagcagaaatggctacatcactacaattggatgggtgcatggatgtgtagatggattgatggctcagagccccccaagccaaaccatcatctgtatttcttttctctagccttcttataggtaaaagttcttagaaaattaccttatggataaaatgttacacaaaatgggagttccgaaaggatgttgacattaagttcagagcagtgtttcattctatatgcttgttataagttcagagcaacatttccacatggccttgtcctaccatagtgcacacctgtggcttcatctttggacctcatactcttctcttaacacaaacttcatgcttttccttgaacacaaagttatcacagggactgaagagatggctcagcagttaagagcactgactgctcttccagaggtcctgagttcaaatcccagcaaccacacagcggctcacaaccatctgtaatgagatcagtgccctctttccgtgtaactgaaaacagctacagtgtacttctaataaataatagatctttaaaaaaaaacaaaacaaaacaaggggctggtgagatggctcagtgggtaagagcacctgactgctcttccgaaggtccagagttcaaatcccagcaaccacatggtggctcacaaccatctgtaaggagatctgacccctcttctggagtgtctgaagacggctacagtgtacttacatataataaaaaaataaataaataaaaaacacgaaaaaacaaagttatcccaaggctagtctccttttattagaatatgagtgctcattttatttcttaatatacaacccttacttaatgttatgagcagtgggcaattctgtgcttgattatacctttgttacgtctttttagcaaaacaactaaaaccaagattatttgaatcaaattgagaattctataaaattattaattcatctaaactgaattaattcatgaaagttcctctttatgttaatctgcaggaagtctactcaatagggtgggctaatgcccagggattattatattattttagtaatgacaggaaaggcatattagctacaagaagcaatcctgagaagtctctttgggaccttgcctcatagagcttacccattgcagacaatgcaaaaacagtggatcacctcagggaaggccactattagattagccttagcctatcctagattgctccggacactttgagttcccttctttgtttccttgaagaggtaaagtaaatgttgaggcaggtttgggcaaatggtttctgctcatgctgttcttttagagtcctggaagcctgcagatacagaaggcaagaagcagtatgaccgggagttcctactggacatccagtttatgcccgcctgtatccaaaaaccagaaggcctgcctcccatcagcgacgtggtccttgacaaggtaagccgtgtgatctgagtgttgagtacagacaggtgcagtgcaggcagctcttaggaactgtcagatcacaggcattaaaaaatgtaatgcttaagaactggctgggcccagaatgttgtcttttttagatatttagaagttctttctttttagatcttattttattnnnnnnnnnnnnnnnnnnnnnnnnnnnnnnnnnnnnnnnnnnnnnnnnnnnnnnnnnnnnnnnnnnnnnnnnnnnnnnnnnnnnnnnnnnnnnnnnnnnnnnnnnnnnnnnnnnnnnnnnnnnnnnnnnnnnnnnnnnnnnnnnnnnnnnnnnnnnnnnnnnnnnnnnnnnnnnnnnnnnnnnnnnnnnnnnnnnnnnnnnnnnnnnnnnnnnnnnnnnnnnnnnnnnnnnnnnnnnnnnnnnnnnnnnnnnnnnnnnnnnnnnnnnnnnnnnnnnnnnnnnnnnnnnnnnnnnnnnnnnnnnnnnnnnnnnnnnnnnnnnnnnnnnnnnnnnnnnnnnnnnnnnnnnnnnnnnnnnnnnnnnnnnnnnnnnnnnnnnnnnnnnnnnnnnnnnnnnnnnnnnnnnnnnnnnnnnnnnnnnnnnnnnnnnnnnnnnnnnnnnnnnnnnnnnnnnnnnnnnnnnnnnnnnnnnnnnnnnnnnnnnnnnnnnnnnnnnnnnnnnnnnnnnnnnnnnnnnnnnnnnnnnnnnnnnnnnnnnnnnnnnnnnnnnnnnnnnnnnnnnnnnnnnnnnnnnnnnnnnnnnnnnnnnnnnnnnnnnnnnnnnnnnnnnnnnnnnnnnnnnnnnnnnnnnnnnnnnnnnnnnnnnnnnnnnnnnnnnnnnnnnnnnnnnnnnnnnnnnnnnnnnnnnnnnnnnnnnnnnnnnnnnnnnnnnnnnnnnnnnnnnnnnnnnnnnnnnnnnnnnnnnnnnnnnnnnnnnnnnnnnnnnnnnnnnnnnnnnnnnnnnnnnnnnnnnnnnnnnaaaagtccccagtcctttgcatagacttaaagccttctcttttgaggttttttttgttttgttttgttttgttttttgtttttttgagacagggtttctctgtgttccctggctgtcctggaactcactctgtagaccaggctggccttgaactcagaaatccacctgcctctgcctcccgagtgctgggattaaaggcatacgccaccacgtccagcgggtctcttttgagtttttaatgcgtatttattactttatgtgtatggatctttgccagcatgtatatctgtgtatcacatatgagcctagtgttcatagaggcaggaaggggctgtcagatcccctaggactggagtcacatatatgttgagttgccatgtaggtaatggaacctcaagtcctcttcaagagcagcaagtgctcttgaccaccgaaccatccctctgtccccatcatccttcctctttatagtttgtttatgtggtgcacaataaaagttagtgcagtacgggcttgtttattatgtagtgagtgcataggggaatgggactgggtggtggttaaagtacttactgcacaggcctaatcattcctggcggccactcacatccagcagctccggggctagtttcccgagtgagaatcagcgcttacctggtcagctcaccgcatcagtggcaatgaatgcactggcacacgtgtgcgtcaagctcttctctgcttcttcatgcagatcaaccagcccagattgtcaatgcggaccctggatcctcgcattttgcctcgaggacctgacttcaccccagcctttgcagattttccaaggcaaacgcctggtggaagaggtgtgcctgtaagtaccagttccctaccacagcccagtcagtcaggaagctgcggttaagatactgtgtctaagcacgaggagcggcttctctatgctgagtcctgtgatgaaaaagtagaagaggcaaacactgtcctccgtgctcatacccatgggagtgttacagcaaagggatgagcactgtctgaccacagcggcttggtctgctctgtgttaaccgtctccgttgaagttgaccggcacattcttttgctatagaaccagtcttgggtagtgttctgggatgtcatggtatcctagagattccagtggctttcagctaatcctctctttgtttctacagatttacaaagtgcaaagtgggcatggattgccaattctggaactaagcccagccccggactgccctccataagcggtgtctcactcacccctgacttgcttacctgtagggaagggctgcatctttttttatgtctgtgttgatgtcgtctttggtttgctcttatttactataggccatgaagtcaaaatacaggcaaatggcgtctccggaagtgtagtgttagtaacttacttgtgggttgtcagacacacagagtggcatcgccactcaccagagggtctgcactgggtacctgacacactgtgccagactgcaggttcggtccactccctcctctgtagatcagagggagcgtggggaccattggttcttctctacatggcatggctgtgctctctgaattgcctgatggagctcctaaatcatccatggaaagtacagagcgggggctctccggacggtgggctctccgggcagtgcgtcttctcaggttttgctaccagctcattgttcgttgttatccaatacttgatgcaaagcaaggcatatgagttgagaacaagttgtatctcttagaaaagagtggaaatagacatgaaattttagagcgacgttttgggaaagtagagaggtgccttagttagcaaagtgctccccacaaagccgaaactagtactataaagtactatatttttttaaaggatagtttgggggtttttttggttttttgttttggtttggtttggtttggtttttcgagacagggtttttctgtgtagctctggctgtcctggaactcactttgtagactaggctggccttgaactcagaaatctgcctgcctctgcttcctgagtgctgggattaaaggcgtgcaccacccacacccctaaaggatagttttaaagttaccatttataatatcagtgcaaactaaagctctcacctcaatgtaagagtttattctagaactagagagatggctcagaggaaagagcactggctgctcttctagaagtcttgagttcaattgccagcaaccacatggtggctcacacccatctgtaatgggatctgataccctcttctggcatatatgtttgataaatatatcaattttgtaaagtttactttagatttaacagtgagtgagcaaggcccaagtactcagatttgggtttcttcaaatgccccactctaacttcctcgcagttctatgacattttttagtaaaagaacaaaagaataatcactttttaagtacaccaatggagattttaggtaaggggttataggcagacaggggaatcttgccttctggcctcacagacaatctgatagtattcttgtcccttggattagtagaagatagggatcgttagcacgccccaaaagaattccctaatgatgacaaagaagttatgtcaagcacagaggtggccaatgaatggcttggtaatggtgctaaagatagcccaggataggttggctttctcgtgagaccctcagcttccccgcttcacagaagctcaggcagtttgccttgtataacctttttaacacggggtggctttttcctctgggaaattaaagtgggtgaggagatgtgtgccagtcggtctcgcttgcaggttatactctcgaggcgtacttactggtgtttgcactagtttttgtaaatgactatcctcaaatatgcattgtgtgaatcttcttcatatgaggtatatagatgtatggtacacatatgcacaaggtacatgcctgtggccagaccaaggaccatgtctagtgtccccctccatcacagatgaccttgttttttgagacagggtctcctgtggaacgtgggtggggcttgctgtttcagctacccaggctggcaacaggctttcaggatggtgtgtctgcccccaccgccaccactgaggttgcagatgtgcactgtcactctgtgtcacctgtcttttacatgcgtgctggggatgcggcgcctgcatgttaacacctgttctgtcttgcagggccttcattctgtgaccttccatcattttatatcagttcctgtttccccagggcgtttgttctggtgtgtttttatatccaagtgggggttaaattgtttacttgttatttccaactctggaaagggtccttatccatacaagctgcctgaggaatgtgagtctgatcccaacatccaggcagcgtttggctaactggatagctcagcagagctctttgggctagagcctgtataggagatcatgtgtgagtaactgtcctcactctgccgcagccactgtccctgctgtttctatctttagtgccactcggttaaaccatgtctcattccttatctggcctgcttttgtttttgttttgttttaatgtttgctgaaacatatgagatcctgccatctgttctgtgtcctttcttggtacatttgacagtattcacgaggatttgaactttcatcctgatgtccacttggcactgccatttcgagtccttgactcatggttggtgtaaggaatgcctttggaacattgagttggaaatgcttttaagcttatcaaccttggttaggtctgtatctgacccggacagtctgtttttatggtactttagtccgtatttttcccccggagttctctatgtatttaaaagtgcagcactgttactaaatgagatactattgtggtttgcatcttacgaagactttttttctgtagtgtcaacaatcctcttaaaaataatgcaaatatttacagcatttgaatcagaagaaaatccaggttatcattgtgtaacaaggctgagaaatccaagcacagtatcgactctgactaatcttgagcagcaatgctggctgtggaggctctctagttcaggagagcctaaactgcaggaaagcctgcctgtgtccccaaataagggcacatgccttgaattccagcggagacagccagggctacatagtgagattatttcaaagagggacaaaaggaagtaaagttcaaaatccaataaaggaagctgacttaaaacacatttaaggtggcaggtgttagttctacatacaaaatatagctttaaatttttgtttatataagactttttaaaaacatgcgtatgtatggatttgtacatgttgtatgtgtgcattaactgcagagaccagaagagaacattggaccccaaggacctggaggtcctggcatttgtgagctgcctgccatgggtgctcggagctccagccctaagcaaaaacagtgggtcctatttaaagatctattcattttttgtgtgttggtgagaactcgatctgtatatatacctgcatgctacaacagggcatcagatcccaggatagatggaagtgagccaccgtgtggtccttgggaattgaactcaagccttttggaagaggaagcagtacacttagctgctgtgctctctctctctctctccctctctccctctctcactctctccctctttctccctctctcggttgcaaacagtagttgagctacctaacgagggtgcccggaaccaaacttggtgtttcggggaaaaaaaaacaaccccacccccttttttaaggtagagctccatggagcttagtttcctggaacttgccatgtagaccaggctggccttgaactcagggatccacctgctttcccatcctcgtgctgagattacaggtgtataccatcatgtctggccaccagcaaacattcctaacttctgagccatgtcaccagccctgcacaatttattttgctttaacaatatttaacttgatgaccattttgtcattgatgcatgtttgtattactacacgtatcatggtaggaggggaagagagaaatacagacttttttccagacaagagttagttccccttgcattgaagaagtctggaatcacaatgccttaagagtgggtgtctgttacagaaaatttaataataaagttgtattgaaattctacctggaaagttcacaaatacagcttttgtttcaatgtcttattgggttagaatttattaatagtttgttgttttttgttttttgtttttttggttttttttttgacacagggtctcacccttagcccaggctgtcctagaagtcagtgtagcccaggctgacatttctatctcctgtcccacgtgctgggctgacagctgtgtggggcagtagcacccctagtacagatagttgtttctttcctttcctttgacagattgtgggtgtagctggggatgtctcctgggaacgtctgtggagccctggtgtgcccatcgaggcctgtgccaccggtgtggcttctgttgagcacaggcttcctgggttgcagtggtagtttatcagacaccattgtttgatccttgaaccttttagaggtaaagccgttgcaatgatggtattctgaggcactctctccctcctgcctcctcaggaagattatttctaacctggacacctaatacctggtcttttcatctggaagtgtttgctgtgaccatgaagcttgagcagccacacagaagcaggctgctgggcgttctctgaatgcatgtaatgttcttgtcctagctgttgaatgttggacctcggaggtctcaacctggccagagaagggagcccagaaagataatcactgtctccgtaaaagaagatgtgcacttgagaaaggcagagaatgcctggaagccgagccagaaacgggacagccacgccgatgaccccgaaagcattaaaactcaggtgaggagcactatgcctgtgtcctgggcagaagtgtgttactagcctgagccttcccgtgcaggctctctctatatatataatagcattgttctgtgggcctcattactgaggcctacataataagaaataatcaattctgtgttggtggcccaaaagtgtcattccagtaacagctgtgtagaccacctcaaactcagccttgtaccctagtgttaaaagtgccagtttcattattccccttctgcagagccgtgtttccattgtgttggtgattagtctgtgacctgaggatcaagctttctttctgcttctgtctctgtggacggaaagcacaacttgtgctgccagaggcttggtgggggtgggggtggggcatcagatcctctggaactgagccaattgtgagctgctgtgtgggtgctggaaatgaaccctttggggtgttcagttttggtgttgtctttatatctgtcgtatgggattaagtccttgaggttggttggttggttgttaaactaactgataacatggaaagcttacgcagattaggatttgaattaaactgtagatgacaaaagtgacattccagtgacagagcctcccagcaggtgaggcttatccgcctccttctgctctgctctggtcttctctcagtcttcctgcagggttcagtccttcttagaagctcctgtggctgttttgttgggtgttttactaagtactaggcaattggaagcaagacactgtctcaaaaccagggagggatggagggacagaggcaggctgggtgaagggtaggtgggtataaactgactgacagcctttgcagcttgttgtggctcctgaggtcactgggctggctgactgggagctctttatagacttgcagtcaggttttatgtgcagacagctgttgtcctttgtggactgggctggtctctccctttccgaggtgttggtctttgtttttcttcttacacggaggccctttcagagggtattgaaaagcagtggtaaaaataacatagacacgtgggatattgctgcgctgtttctttttcttttttagaattatttattttatgtatatgagtacactagctgtcttcagaggcaccagaaggggacatcagatcccattgcagatggttgcagccaccatgtggttgctgggaattgaacagtcaatgttctccagccttgtccactgttttacattcttcttattaactctaagtcaactctttgggacagggcttcacctagaactcctggctggcctcgcactcaaagagattgcctgcttctgcctcctgagtgctgggattaaagtcctacaccactgccccctccttgctctgtacagctctaagctgcttattcaaaaccagcaaaggactagttttaattttagtgactccccactagtcacatggtaggtctctggtgacaggagtttccagtacctaggctctggcctgatgattcaaggtcagcctaggaaatatatgatgctttcttttttgtttggttttgttttttgttttttcgagacagggtttctctgtgtagccttggatatcctagaactcactctgtagaccaggatggccttgaactcagaaatctgcctgcctctgcctcccaaatgctgggattaaaggcgtgcgccaccactgtccggccatgtgatgctctcgtaaatttttgtgaatcaaaatctttttatttagccctaattaggaacaaattttttaaaatgatagtcattcaaaggttgcatcaaccattttaaagctttaaatgcactgttcaggtctgagaaatgctcagggaagaggcagggctgttttacagttgaacctgtataggatatggaatccccaacctaccccccaccccccaagttctggttccataggagcaaagtggaagaagaaaggaaactgtattcaattttcctgactgaccattaagtgacaagtcgttcctcctctctaaaatgttccatatgaagagcagtgtgggagttcccttagatgttaagtgggtgcatttaagactggctaatgctgtttattttaaccctcctaggaacttttcagaaaagttcgaagtatcttgaataaactgacaccacagatgttcaaccagctgatgaagcaagtgtcggctcttacggtggacacggaggagcggctaaaaggggtcatcgaccttgtctttgagaaggctatcgatgagcccagcttctctgtggcgtacgcaaacatgtgtcggtgcctagtaacggtaagaagagaggaagcagtaaaccgagagtcgccaagaggtatactctcccctcagtgtagtcttcccagtgttgttgcagtgcaaaggggagaatagattgctagccctggtgtatctgttctcactgatagaaaagaattttgcaaaaataatgtctgttcccacctctggggcggggtatttggagacttgcttgaaatgggcacaagcttatggtctcctccaacccggagaaccctgtgagggttagggagtagtgtggagtcagatcacaggcaacggttttattctggagtgtcttcttatagaactagagccggtactaactttaacataaactaaatttaaaattaaattaactcttctaattctggcctctgaaactacgaagatagttgtcttatcatcaaaaatattcaaaatcggaatgtttcctctcttgctagacatagtagctcacaccttcagtcctcgcactcaggagcattctctcagcattgagacctgcctaggatctcagcaacaactaaaataaagaaataagcattaatttaatccatagcatatatatggacatacatacacatgactaagattaaatcttatttaaaccaagagaagcaagtgaattcaatgttacagcattgtaaacatagcattcccgcttggataattgtctacctgctgaagaaattcgtagaaagggaaacaggaagagggagggtgaggcgggctggcgctggctcagcacctccaccaccagccaccgcctgagccgcctaccgctccttgcatctacatcattgtgtgggtgggtgtggcaaacatagtcatacaagtttccatatgcgagtgtgtgtacctgggagaccagcaagggcgtcagattccctgttgttacaagcaattgcgaatggcctgatttgggtactgggaccttaacactggtcctctggcatagcagcaggtgcccctggagccctcaaacattattctttgttgattgataggacctcagctctaacactgagctggatcagtcttcttccggtccttctccctcctctccagctgccagcatctggagatggtttgagttagcgttggcctctctgggagctgccacacaccgctcaaggagagaacagtctctgacaacagaggtttttagctcagctgacagtgttcaagcaaccctagctgggtagtgtcgtcacggattaagggggatatgtattctcattatttagaattcctttttcagtctcagtgctgtgtacatagattgtgtgctttccactcatacccacactctctctttcattgttgtgttttttggggcgagataagaaacacggggctttgcacatgctaagcaagctatgttatcagtgatctaccaacgcttcaacatatctccatttgaacccttccttctaggtgacttgagcccacccagcactataaaaatgagtgagagactgaaatgaatgaatgaatgaatgaatgaatgaatgaatgaatgaatgaattgaataccttctcatgtgatttttgcattgcttaggtgaattctaaagaatacaatggagtccctttttttctcgcattgttagatatgttgaggagctgatattacagatgttttaacaagccacacagctgcacttgatgcctttccctaccaccttgtgctcaggcaaaccatgtacaactcagggatcagaagagagaaaggcagcttccgatgcatagcttctcccaggtcaataagaagtgactaaaggacactcgggacctcagccagctggaaggcacatagctgaaatgtcacaccttagtgcctgaagagaactgtcctacaggccttattgatagtgacagtgtcaggctggagtatcgtcagttgtatcattgaagagtcgatgccaacaagaccctatctcagcattgaggaacagtagattagccaggcaccgcagctcactcctcaactcccagcactcaggaggaacataaaaagttcagggccagcctgggctgtgtactgagctctaggctagccagagatctatactgtagacctcactctcaaatcataaaatataaagacatttttaactaaaataaataaattaattttgtaacctaagttgccatattttgttctaattaattagcatgaaaatgaaaatctacattccagaatgcctctgaattgctgctcaagtcctcctgtctaaaataccactttgtgtctggagagtgaatgcctggatacaaaagtgtgctgtccaggtttatgccagcttcacacaagctggagtggtcagacaggagggagccccagttgagaaaaatgccttcataagattaggctgtaggcaagactgtaaggcgtgttcttacttagtgattgatggaggagggcccagcccactgtaggtggggccatccctgggctggtgttcctgggttctgtaagaaagcagcctgagcaagcagtggggaacaagccagtgagcagcgcccctccaaggccttcaggtctcggcttgaatttctgccctcactgcttttaactgagaatgaaataaagcctttcctccccaaaatgcttttggtcatagtttttatcacagaaatattagccctaattaagaaggtaaagaatttgagaaagtggtgtgaagcaggcctgtaattccaatgggaacatgagaaggaaggccaaggtcctcagctatagcctggagtacttgggatcctacctcaaaaagtcaagaagataaaacaaaaacttgaaaaatctctttccatgtcccatgagaagttcccttgtgtcttatctgtgtggcaggagtgtgagtctggagcaaaatggagaaagctgccaaggaggttgaagcatctgggagttacgttcctctgcacaggtgtgggggaagtgaggagagagggatgggttgcgagtgggtcagactccgccgtgatgactggaaagaaagcaaggtgcacgtctgtgatcccagcactggggaagctgacaagatgctcaggagttggggcagactggtctaacagatcagatatctgcctcggaccatgggtgtggctggcgtgcattgggtgaggaagcgagtgtctcttgcacagtgcaccgaagcagcatccagctttgggaaaagagggctctgtttggagttttgtaggcatccttctgggtgtgtctctgggtgtctccagtaaagatgtctttccttgcttctgtgcacagtgtaggtagcttgttatatacactggccttggagagaagatagtagtgggttgaaggagctacatttgaactgtcaccttgcagtgacatcccaaatgctgcgactgaggcctgtgccagttaacatgtgccagcctggtaactgactctgggccctggtgtgacagtagggtggacctgacttcactgtgatgtcatggctgttctttgccactttctccagcccttcagttttgatcaggtgtccacagccatttcgttgataagattaatcctcttgattagtcttgatagcatatctgatcccagcacttggaggacagaattggagcggggtggggggggatcaggagttcaccatcatcatagctttatatgaggtcaaggccagctgcagctgccgaggcgcctctcaaaaatagacagcatgatgttacatgtttgattagggtttcatccctgattacttcaaagcaagtaagaagggtgtgatgactggtgactcaggctggtatcccagcactgaggtgccataggcagtacagttccaaatttgaggccaacttgacttccatgatgggacccaagcctgcctaaagtagtgacaccctgtctcaaaaacagctaccccccccaaaaaaaatgattttcacccacatggctgaggcagtatattaatttaagaactgttggatccactttctgagtccagaaaagcccttttccgtgttgtacagtaactgagtcggagaatttcgtgttttcttataatggaggctacattctgctgtcagcataaaaggagggtgagatggctcagtggatacaggtggcttgctccacaacctgatggcttgagtttgatccccattccccaagtagaaagtaagaatcctccacgggtgcaccaagtgcatgcatgtgtacatgcacactcacacacacacacacacacactcacacacacacacactcacacacacacacacactcactcacacacacacactcacacacacactcacacacacactcacacacactcacacacacacacacacactcacacacacacacacactcacacacacacacacactcacacacacacacactcacacacacacacacacactcactcacacacacacactcacacacacactcacacacacacacacacacacacacactcacacacacacacacactcacacacacacacacactcacacacacacacactcacacacacacacacacacacactcaccttatataaatgaaataataataaggtttaaacaaagagattaccttccacagtttaacggtgtaggtatatggaagtaaccactgtattcataatagattccacttcagcttgggatatatccacagaagtcagaaggtgtgtgtcttctctgtgtcagagacaagacagctttctgttgcactgtgtgaaagactcagctatgtgttttagaatgtctacctgtgtgtctgtctgcattaagtaacctggctgccgttgctctttgttctctgaatgcagctgaaggtgcccatggcagacaagcctggcaacacagtgaatttccggaagctgctgcttaaccgctgccagaaggagttcgagaaagacaaagcagatgatgacgtctttgagaagaagcagaaagaactggaagctgccagcgctgtaagaccttcttgacataaagtactgtcagagttgtcctacaactagctatggcacctacagagggaccgtgtgtgtgtgtgtgtgtgtgtgtgtgtgtgtgtgtgtgtgtctgtgtgtctgtgtgtctgtgtgtctgtgtgtctgtgtgtctgtgtgtctgtgtgtcggcgtgcgtgtagaggtgtagtgttctcattgaaaatgctttagtcctatgttagaggcagtcacttccacagcaaacgttagtctaacatagaccttaggttcatctatctggaaggatgcacactttggtgtgtaggtcttttttttctgaggagtgaggctcagtggtccttgtcagagcatttgagccccgaaggagtgaggccctgcaatcttaggtgttctctccccccccccccccccccgttttacacaacagccagaggagaggacaaggcttcacgacgaactggaagaagccaaggacaaagcccggcggagatccatcggcaacatcaagttcattggagaactctttaaactgaaaatgctgacggaggccatcatgcatgactgtgtggtgaagctcctgaagaaccacgatgaagagtccctggagtgcctgtgtcgcctgctcaccaccatcggcaaagacctggactttgagaaagcaaaggtaccacgcaaagactcaagtctcccggccccagggagcctacccctgttggagcagtctgtgtgcaggctccttccaccctcctcatggcacatgtgactgacagtgctcctcacagtgctctaaggggaggtgctccctagtcacgtgcaggtcagtccgtctgcagcctaggtgggttggtccttctctttcataaccattttataggttataagcagaagtaggttaagaaatggaccaggtctgaaaaagaggatagaaaagctagtggggttgttcattatgtgtgcaccactgtgcccacttcaagtcactgtttctgttttgctttgttttttgagacagattctcactatgaagctctggcagtcctggaactcactatgtagacttgagtagctttgaactcacaaagatctgcccacctctgctcctgagagctggggttaaatgcatgggacatcatgcccccttctcacttgcttcttaagtttaaggactaattaatgacattgccacctaatcattgtataggaagctataaagacatagtctgacactgtacaaataaaggaaacacattagaaatgcttcagagaaataatgacagagatgagtcacccagggttatgtttgtatgtgacagaggcagggccttccagctttcaggcctaagcgtgtatttcacatcttataacttactctgcttgcatagtttcagcagagatcataggaagtggagcgtggagcaaaggacagacagagtgctgggtcttccaaagctgcagtatgacatgccaggagcctagcaagtgtgctctctgtagtggctgcatatattctccattaaatgccattgctggcgacagggaaattgttgaatgattacaggtgcttgcttgccaagcctgtcagcctgagtttgatccttgggaaccgcatggtggaaggagggaacgactcccagaaatctcctcccacctccatgtgtggacacatagtagaaacacaatacagtggtaataaaatttcaccagtgcttctagccataaaaagttattctttaatcacctaaaactctacttggtaccttagagtggtccattacccatctgtaattattccagcactcgggaggctgagtcagagcgataacaagttcgaggcagcctagactgcagatgaggacctttataataaagacaaaaaccaaagtacatggaaaaaaaaggaaattgaatttctcggccagaaatcatggtggttttattatttgcagccacgcatggaccagtactttaaccagatggagaaaatcgtcaaagaaagaaaaacttcctccaggattcggttcatgcttcaggatgtaatcgacctcagactggtaagtcaggtttctagcaatacacaccatgaccagaaaccatttgggaaggggagggtttctttcagtttagttttatagtacagtcttatggtcaaaggcagtcagggcaggagcctggaggcaggaactgaagaggaagccatggaggaactgctgactggctttctcagcctgtgttttacacagctcaggaccacctgctcagagacaaaccacatgcattaatcagggaaatgccctccagactgcctgtagtcagtctgggtggaggcatggtctttttttttttttttttttttttttttggtttttcgagacagcctcctgaaactcactctgtagaccaagctggctggcctcgaactcagaaattcgcctgcctctgcctccgggtgctgggattaaagacgtgcaccaccacttccagctttttttttttaaattagatatttactttatttacatttcaaatgttatcccctttcctggtttcctttccgaaaaccccctagctccattcccctttccctccccctgctcaccaacccacccacacctgctttcaggtcctggcattcccctacactggggcattgagccttcacaagaccaagggccttttctcccattgatgactgactaggccatcctctgctacatatgcagctagagccatgaatcccaccatctgtactctttggttggtggtttagtcctgggagctctggaagtactggttagttcatattgttgctcctcctatggggctgcaaacaccttcagctccttgggtcctttctctagctccttcattgcgaaccctgtgctcagtccaatggttggctgagagaatccacctctttatttgtcaggcactggtggggcctctccggaggcagctatatcagactcctgtcaggaagctcttattggcatccacaaaagtgtctacattcggtgattctatattggattcagaaccccaggtggggcagtctctggctggtcattccttcagtctctgctccacactttgtctctgtaacgcctctcataggtatttttttttccaccttctaagaaggatcagattatctacactttgatcttccttcttgagtttcatgtggttagtgaattgtatcttgggtattctgagcttctgggctaatacccactatcagtgagctcataccaagtgtgttcttttgtgattgggttacctcactcaggatgataatttctagttccatccatttgcctaagaatttcataaattcattgtttttaatagctgagtcgtactcagttgtgtaagttgtgtatcacattttctgtatccattcctctgttgaggggcatctcaactaaagaatacctaatggctgagaggcacctaaagaaatgttcagcatccttagtggtcagggaaatgcaaatcaaaacaaccctgagattccacctcacgccagtcagaatggctaagatcaaaaagtcaggtgacagcagatgctggcgaggttgtggagaaagaacactcctcggttgctggtgggattacaagctgttacaaccactctgagaataagtgtggcagttcctcagaaaattggacatagcactacctgaggacccactaataccattcctgggcatatacccagatgatgctccaacacgtaataaggacacatgctccactatgttcatcacagctttatttacggccaggagccgtaaagcacccagatgttccttaacagaggcatggtctcaattaagaatcgtcttctagataactctagcttgtgtcaaggtgacagaaaggggtgcggggggagatcaaacagactcaagtgaagaagtcggtgttgtttgtgtgagtggcacggttcttgcttcatgcccaggactaaagtacaagaagaaggcactgcctggcttttttttcccagttagcacaccacactgcagctctgacattggtcatctgaattcagtactggtcagtgagactcaggctttctaaactgaacagctggagtctcctctccatagtgaacatgttgaactcataagccatgtgtttgatttctacaatgatgctattgctgtccttcagactgtacnnnnnnnnnnnnnnnnnnnnnnnnnnnnnnnnnnnnnnnnnnnnnnnnnnnnnnnnnnnnnnnnnnnnnnnnnnnnnnnnnnnnnnnnnnnnnnnnnnnnnnnnnnnnnnnnnnnnnnnnnnnnnnnnnnnnnnnnnnnnnnnnnnnnnnnnnnnnnnnnnnnnnnnnnnnccgtaccacagttcagtgagataagtgtctccattgaaactcatgggcaccctgtcatcccggctgccatgtttatctgcctcagctggaagcactgccccttcattcctctcagttcttagggcaccaatgaggcttctttgtcttgctaaacccaggtataatcttagtagcaaaagctgtgacctgttgctcagagctccctcacaagctaaattcaaccattttccacccatgtctccaccatatttgctcatttcggccattggaatggaggctgggatggagtgaggcaagttttgtctcctgagaagagagaagcagctttgtgtggcattctgggtagggtaccagagtcatagtaaaggaagaaaaatgattgtcccctttgatttagagctgctgtgaaccaagacatgaactgagtattagcccctcatgtcacacagtcctgaagaatctcccttcttcctggcccacttcctttctctcctagttcgtcagccatcctggcagctgcatcagccacttcttccttctgacgcttacccttcagttgttggaatgtgcgctgcacaccccgccagagttcatttccttagcttgaaatcctacagtacccctgtcatccgtgacaagctgaggggcttacttctccacttagcaagatattttatatggtttatgcagtggaaaagtagacgctttttcctttttggggcttggggtattaccaggtttctctgtgtaaccctggctgtcttacaacttagtctatagaccagactggcctcaaaatcacagagatctgccttcctctgcctcctgtgtactgggactaaaggtgtgtaccgcactgcccagccaaagtataagcttttaattgatttttatttggaaaattacattattgttcttaggtgtagtgctgaggaccaaacgcagaacgttgcacatggtaggcattcaccaggttagacgcctgaccctttccgggtcgtcctgtgggacttgactcttagccttgttctcttctcatagtgtaattgggtgtcccgaagagcagatcaggggccaaaaactatcgagcagattcacaaagaggccaaaatagaagaacaagaggagcagaggaaagtccagcagctgatgaccaaggagaagaggagaccaggtgagacagaggctggggtgcaggggtgcagggggcagggtgctgggactgctaggcaagtgctgcgctccatcctacagtgtgtcacttttatttcttttagctttttttcttgtgacaaaaccttgtgtctatggctagcctggaactcacggtatagtctaggccagcctggaatttctcctcctgcttctgcctcccaaactctgggttgatgggtatgtgccaccatgcctggctttgcacatatttttaaaataggtgggaggtagaggcaggcggatttctgagttcaaggccagcctggtctacagagtgagttccagggcagccagggctatacagagaaaccctgccttgaaaaaaacaaacaaaaatggcagggcaagatctgacaattagatatgaaatttaagataaggagaagtcaggatttctcctgagcacccaaggcttggacagagagaaacgcatgtgcattccacagcactattgatttagatagtgaggtccatccaactcctccaaggtgtagatgcagcctctgttgacccttagccctgcagatcccagactcagtgccagttcagccaatacccattaatcactgtgtttttttgtttttgttttttggttttttttgtttgtttgttttttcctaagtaatgtttcctgatagccagagagcttgggcttggcattcgtatgctgtgacttaaagactccctgccagctgtagtggcacccacccgacgtagccagccacatctgctctccacaggcagactctgtctcaagaaaaccaagaacactccttttactaggactgccattagtattttaactttctgtttgtgatctccttggtttgatggcattcctcggttgacagtattctcagcgacaagctggcttgaggcagtgatacaccgcctcactctctcctccccgcaggcgtccaaagagtggatgaaggtggatggaatactgtacaaggggccaagaacagtcgtgtactggacccctccaaatttttgaaaattactaaagtgagtattatactttaccaagcttggtgtcttcctgttatcccagtacttaggaggtgggggcaagagagtcagaaatttatggttatcctcggctccgttgcatgtttaaagccagcctaggctatatgagaccctgccctcccccaacgtgtctgtgtgtgttgaaaatttaaaacacacactcgcagagccaaatatggcagcacacacctttaactagcacttagttaattagttaggaagttgtggtaggaagatgtttgtgaccagccatggctatataaactgacgaagcaatttgcacataattgggcattgtggtataagaagaatcatttgggtctggagagatggctcagtggttaagagcactgactgcccttccagaggacctgagttcaattcccagcaaccacgtggtgcctcacaaccacttgtaacaggatccaatgccctcctcttgtttgtctgaagacagagaaagtgtactcacatacataaataaatattaaaagaaaaaaatgatttgaagctgtgtaatttgttgagcatgttagtaagacattctgtacagaagacccgagcataccctgaaaaccagagtggccgtcatcacactgttctgtgggtcccaccttaatgagcacagctccagtttacagttgcttgttttattttgaggcaaggtaccctggctggcctggaatttgctatataaaccaggctggcctggaacttggcctccaaggcttgtgttaccttacccagctaaattcattgtctttaaactgaaactttgttgctaaagttgattatatgtcactgaagaaagccatttaaaaaatgtacccttgaatgacctttggccacttttttatagcccaccattgatgagaagattcagctggttcctaaggcacagctgggcagctggggcaaaggcagcagcgggggagcaaaggcaagtgagtccggtaagtgcagagggccctgggctggctggctggtctgcatgcttttgccctgcagtgccttccctgggtctggaattgtgctcctctgcctgcagttgctgagccatactcagtggttctcagtcacatgacacagccacttccttttctatagggctctttcaacatttaccattagatttattttatcagtaggtgtgttttgcttggatcttcgtatgtacagcacatgtgtgtttcttgcctgcaaggtcagaaggtctcaattttgggatctagagttagaggtgattatgagctaccgtgttggtgctgggaatgatggaggttctaactactgagccttctctgtgtaaccctgcctggctgtcctggactatctggatctatctgcttccttttttttttttttagtttgagacgggaggttctctgtgttcccctggctgtcttggaactcactctgtagaccaagctggccttgaactcacacaaagtaatccacctgcctctgcctctgaagtgctgagattagagacctgtccctccacaccaggcctcaggtgttgtttcaaatgcctataatcctggcatttgggtgataaggatgggaatccatgctcatgcctacctgagctacatagcaagacacagttgtcaaaaacctagtttgtagctaggtgtggtggcacacatctgtaatgctaacactcaggaggctgaagcaggaaaattacctaggcaacatagtaagtcccagggtagcgagaggtttgagccagcaagaccctgtttcaaaaacagaaacaaaaaggttgggtgtgtggctttatagtagagtgcttccctggtgtgcccgaggcttgagttttggactaagaatgagtgtagttgctgatgttcgtcatgtagatgtctacatcggatatagatgacacaatactatcatctacgaagctcatattgctgacctctgaagagctgctgacctctgatggccctcaagggaggggattggttctctttaaagagtgtggctcctggtgggtctgttgtgagccagctgaaggctccatactcccaagtatgggagcagcacacattggacttggtggagtttggggatttttgttggtggtgtttgtttgtttgttttaatgacaagtttagaggggttggaagtggatcggggaaaagaagttttgaggcgtaagttgggggtagttatgattaaaatacatactatgaagttcttttaaaaattaataaaaatacttcttaaatttcacactcaagaacacacaatctaattgtaaaataatatgcaaaaaactctcacaatgttttattaaggttattatttgccttggtccaaatttgtgccaaattagaccaaatgtggccaaggtagaagaagcctgaaccatcacaaacatgtattgaaaactaaagcaacaaaatgatccaaaggaaagtgaagaaattgcaacagtgtttccttaggtcacttaacagtcaagtgtttactgctgcctttgctactctcacataagtcattgcgcagtgccttggcgcagttccctcccccctgcttaccacacctgtctttggtgtgtgtgcttggttggtcggtgtgtgactagattccgtgtagcccaggctgaccggaagtcactgtatacctgagtatgaccttgaactccttgcatctgtgactatagagtcctgagatgatggagttgccaccatacctggctgaatgtttttaaggacataaatttgtagcaaacagaagtttgtaggcctttttatatgctgataccctataaatgtacttgtcagaatatggtaggtgtcacgtgtccttgctagaaattactgccgacagccatactccctccccactaagtgcttcatcttggctgatgctgggagctaagcaggtctgggcctggttagcacctggatggaaggaatgacagtcattgagcttctaacctttcttggctctcttccttgttaaactgtctctctttacacttcatgtaatcaagttactgctctcagggctgggtgtgcagctcagttggtagagtttctgcttagtgtgcacagtgccctaggcttgagccttagtaactcaggaagcgggtatggtggagagagtatgggcttccagcactcagaagatggagtcatcaggacctgaagaccacatagtgagttccagactggccttgcctatatgagatcttattagaaaaagaacaggggtggggggtgggggtggagtttacctgttgccccacctacttgggaaccagtccagcccagcagtgagggccaacctgaacaacatagacctgtttccaattttagaaggaaagaaattcctggtcttgtttcttattcccagatggcaagaaaacaagtatttgcatattaaccatgtaatttgtattttctttctaaatctacaacacctatagatgccttacggtcaagtgcttccagtttaaatagattctctcctctgcaacctccagcaccttcagggtccccgtcggccacacccttagagtttgattcccgaagggcgttaaccaggtgagcattgctttcatgttcatgatggccgatctgcctgccagctctgtctccctaacactcattctctccctccctccatctcgctcttcctctaatcttgacatacatgtcatttgtaaagtgggagcacctttatggtggggtgggatgaggagagagcaggttatctggccatgctttgttccttaggcagaccagatagagcaccttgccacacttcttgcagtggaagcatccttgtactcaggcatgaaaattaaggaactccaccagccaatacccatctgcttctgtctcagggttgttcaagttacataatgtttccattcccaaacgtcagactgttgctcatgcgtgaggcttctgcagcaggctgctgaccaccaggactgcggcccatctgtcgctcctgtggactctgctggttctgattttcatgttcttgtgtatgttctttgggttaacttcagtccatcctgagtctcccctcctgagttaccttgctcaagaattgtctgaaataagtcagcagggagacagacacccagtgctgtcaagtgcttccagtttaaagttctaagattaaagtgtatggctttagctggtgaaattttcttctgcctctctcacataattcccatgtatttgaagtttctggaaaagaaaacaaatgcttgaaaccaaatgatgtagtttctcaataatgaggttagccctgtctaacgtttgcttcctgccattcagtcggctcccactgcatcactgtctcttttcttcagaggtctacacacgagtaaggactcaccactgacagctaaagtattttagtagagttcacagcttgtgcttaaccagtttaaggtcccagtttaacccccacactcagagccctgcaattgaaaacaaaattttctggcagccaggcatggtggctcacaccttgaattccacactttagaaggagaagcacaggggcctctgagttcaaggacagccatgcaggcctgtgttcttgtcactctccagagatgttgacttgtgtgtaacagcccgagtacttccaagagaaagggccccgtgtcatttacacttacactttactctgcagtcattgcacatgtgcgtgggttgtgtggggaagcatgtgtggcggccagtgagtagaaattagagctagaaagacccggccctggaaattaactcaagtcactaggttggcagcaagcaactttacctactgagccatctcacccccccccccactttgatgtctctttgataagtattgtagtgtatactttggtgctttcataaatgaatacagtgtatttagatcatattcacttccctataaatcttctgggcccttgccctctatcttcctcccaactttataccttataacttttatttatgcacatatatgtatatatgtatgtatacatatacatacacataaatccggaggttagagctgcccgtatgctctctggtatgggcatgcactggagtgtgacggccaagcatggctcacacgctagagaaaggggctctgcctagcagcagctgtcacctgtctgtccgaagcttctcacgcttcagtgttttacaatttattttatatgcgttgatgttttatctgcatgtgtgtctctgtgagagtgtcagatcttggatactggagtcatagacatttcagctgtcatgtgggtgctgagaactgaacccgagtcctctagttgaccagtcagtgcttttagccgctgagccatctctccagcccttcacacttgagggtttttgttttgttttgtttttttgggtttgtttgtttggttggttggttggttggtttttcgagacagggtttctctgtgtgtagccttggctgtcctggaactcattctgaagaccaggctggcctcgaactcagaaatctgcctgcctctgcctcccagttgctgggattaaaggcgtgtgccaccacacccgactcacatttgagtttttaaagaatgatttttatccatgaaaaacaaaactgccacgaaatcttatgctctcttctggagtgtctgaagacacactacagtgtacttacatataataaataaatattttttaaaaaaagaaaaacaaaacttccttcctgtatatataagatctatggatgttttaaagttacaaaatcaaagactacacacaaaaaataaagtcttaaggtagtatcctttttcctcctaaaggtaaaattaaaatatcttagtaaatattcctttggaagctcagatttttgcctattctgcgagttagtacactttaaaatatagttagtgccttatatctgaagttgtgtaggaggctggaaaatgggtcaactagtctggtgctttccaatcacgggcggccttacaaagagaaagatttaaaatagttatatgtagaaaatcttggtaacgctttgtgttgtatgaagcaagacattatcttctgaggcctgttgttttatctttttagtcgtgggagcatgggcagggagaagagcgacaagccaattccagctggaacagcccgtcccaacacgttcctgaggggcagcagcaaagacctgctggacaaccagtcccaggaagagcagcgcagagagatgttggagaccgtgaaacagctgacaggaggcctggatgctgagcgggccagcactgaggccgaccgaagcaaaacgagggagctaggtgagagggccctgggatgcaagacagacctcctattggctttaaattcagaagcaaaatacagagacaggactggcgaggtcattcagcagataagaaccctggctctgcgtctggacgacccacactcagttcccacaccctcttctgacctctgatcacacagcactcatgtaggacaggtacagtactcatacacttaaacaaaaaaataagcagtaataaagctaccaagacttgatgagtacattctgcacccacccctgggagcatccgcacagtgttgtcattgggtgtcaccagtgtctctccaaagctgtgccatcacagagcttccagtcctccctgtctgccatgctgtgacgacaaggtccttttcctttatgatcagtattctgactttctcacagtccttccagcccctggtcccgtggtcatcggatgtcagtgtgttcaaagccctgtaggctctggtagggctcacgttatccctgcttaacagagaaggtgtcagccgccttctccagcctcatctccctcgtcacttgtgtggggtttgtttgtatttagggtgcatgtgctcagactctggtggcacagtaacagttctctgtgtcttcagtctgagctctggatttttatcgattcacacacaccctgtccagttctttcttagaagaaattgagttaacttgcagaaacacttgaaacaggagctgatagataaaatggttttgaatcatcttagagttcatgatgatgagtagagatgagacagacttctggggtggagcggtgggaagcataggagagcggggcagcaggagcagccagccagaggggaggcgggagtggccagccagaggggcagcaggagcggccaggcagaggggaggcaggagtggccaggcagtgtttacacaggtcccacactgggccagtgtagtcagtactctgtcaagcaggcactcacccactgtgtgttctagaggcctttgtgggctcattctttaagcagttgcagggaaatcaaaataaagaaactgccaagctgtggctctaaaggttcaaactatccctaactctggtcatggctagagcgcagactgtggtattactgtgtacctctctgtcctaaagaaaagggcctttgattttcctttcatttgtctgactctgtcaaaccaatatccgtaagacacctgccctgaaaagccagcgtgcgagcacgtaaacatcaccagccaaggtccagttggactgatacttagtgttttatcttcttgctctttgatctcattcatagcaaaatcggaaatgtgtgcagtgccagcccctgacaagcctgcactgtcagaagaggaagtggagaggaagtccaagtctatcattgacgaattcttacacatcaatgactttaaggtaaatgctgacagtgaaggcagcaagcaactcttaggcagcccatgtcagagagcatggcagcttggcgtgacctaggtgtcattatgagcagataagacatggatttcgtaatccagcccttcagggttcagttggctcagctcttgcatttctgccaagttctctattttaaactgatgatctctgtcattcacaaatttaatagtgggaaaagagaatggattccagtcagtgtaaccgagaggaggctaaactgacggtggccttaaggagcagacagcagagtaccactgcggccactgctggccccgtcccacctgtctgggcccttagacatcatagcatcattttcctttccgtgggttatgactgccatcatttttcctttgttttgtaagtgggaaactgaggcacaaaaggacagtgtgtgttcaggtcagaaggcctgagacatttcaagacaccccccacccccaccctgtgagcttgcctttctgacatctcctccacctggactctttaagtgatggttggtaggacaaacctcttgcctgaaaaaagccacagtccagtgacagacagagcagtgcaggtgactccacagatgtcctgagctagaaggggtgacggaagatcgtgtgacccaatcttgtttaccgctcaggtcagaaggtgtctcttctgttaaacagctgctagataacttacacttttgctttggtattattgaaaatcttattattcatttttttgaataacctaaccattatctgctttttgtacacaaaatcactttgattatgtctatccaaaccctgaaaccttccttcacacctgtagtagccagcatctggaagtgggaagaatggtattctagagggttttgtttgttttcagtttcttttgaggccttgtgcaggccaggctagccctaaactcactagccaaggttgatcttgtccttttaatttgcctgcctctgcctcccggttcctggatatgtagaggatgttgtgttgtgttttgagacagtgtcttgctctatagcccagttaagttggagcacttacatgacttagagctgcctcctgcctcagcctccctttcctggagttgtagtcatcagcccccagaccagccagagaaagcttttggtgatgttaaaggtgaagggatgagtctgcagacctgaccctggaacggagtgagccttgaatgaacagcagagggctgctgccctgcgcctgctcagcctccttcctagacagtcagcactgactagctggcagcaccttggctcgtggagaaacatgaaaggcaggagagcctgcagagtgaccgcaggtgacacagcagtgtctgcagagttagatggccaaaaagaggcttcgtgccatgtgatgtcagctcaaattgaactccccaagcacaaagctgcagtgtacttcagggtcagtagtggacacgtgaggacacctcctcgccagtgtaagctttctgagtatgtgggaagacacaaaagtaacaactaatgaccttacaaaggtagataggttgtactagataatttgacctgagcactcaaagtattaaataacagaaacgcagatagagccgcctgcgggcactctcctctgctgtggtcagtggccacctttctcacctctgtcctctcaagaagagcttgcttcagaggttgaaggaaagggaaggctgctagcaccgtgattgctgcgaactgcatggccagccaagcaagctagaccaataggctttgtcctccagtccagagaccaggtggatcactccacaatccatgtaacttcctgtaatagcagacctctttggtgtgagattgtgcagtactgacatcccaaggcagaataaccccagttgccacattaagttcttgtttgttgtttgtttgtagtttggtttgtttagggttttttttttttacagtgtttctctgtagcactgtttgttcttgaactcactctttagaccatgctgatctcaaattcagatctacctgcctctgcctctgcctctgcctctgctcttgcctctccttccccctccccagtgcctagactaaaggcatcctctaccagtcctggctcacgttaaggtcttttaatcttggtgttgttctattttacagtatctcgttttcagagttttaaagtgatgcaggttgacacatactgttacatcctccatatacattatatgcatatatgaatgttaaatacaataattttttggctttggtttttacaacagagtctcatactgtagaagagactagcctccaacttgtggcaatctgcctatctcaacctcttaagtgctaggttagaggtatgaaccaccaaactcttatttggaaacgtactttgggctgctggagagatggctctgtggttaaaagcactgactgctcttccagaggtcctgagttcaaatcccagcaatcaaatagtggctcacaaccatctataatagaatctgatgccctcttctggtgtgtctgaagacagctacagtgtacttatataataagtaaataaatattgaaagagagagagagggggggagggagagggagagagagagaggaaggaaggaaggaaggaaggaaggaaggaaggaaggaaggaaggaaggaaggaagttagttagttaacccaggagctggttcagcagacagggtgcttactgctcttagaggatccaggcctaatactagctcctacacacatgtggagtgtatgcagacattcaggcacatgcacatacgtacatgttaaatacaaaaataaatctagaaaacaacaacaagagtcaaagctctgagaggccatcccccttgggaaggaagttcagcgtttcactgcattacctggtctcaatttcagtctggattaaggcaatccttctgcctcagctttccgacttgacgaacacaggtgtcatgatgtgggaccttgttttgtcaccctgctagagccttgaactcagtgtgcatcccaggatagatttgaactaaacagtcatcctcctgcctcagcatttttagtgtgtgtgttgccacacctaactaaatcagtatttttatttctctctactttttattctagaaatttgcgtatagcaccctttttaatattaaacaaggaaaaaacttacattggaaaactgtcttgtttgaaaagccttatactacttttaatatatttagattttgaagttaccataacatcagattttggaacaagcctttatttgtttgaacaggaggccacgcagtgcatagaggagctgagcgcccagggcccactgcatgtgttcgtgaaggtgggtgtggagttcaccctggaacggagccagatcaccagggaccacatgggccacttactgtatcagctggtgcagtcagaaaaactcagcaagcaggactttttcaaagggttggtatccagtatccttacacctcagctgctaggtgatgtctgccatcctggcctctgtgtcactgtactgttctgacctcacatgcagtgttgattgatagaaccgcggtttgtagactgggctaagacactcatgttatcatctgattttctctgagacctccatccggtgtctggaatggaaaagaaccacagctcattcattcatcacaaggctttaagtcagtgaacctcaacttttcctcatgagattgttgagtatgtgtttgccctgtagatcctgtaggtttctgtgaaatgaccttgaggtgtcagagattgctgtggcccagtctgacttgcagctcctgttccctttgcagtggccctgctcactgccgtcctgctgccctggtgctgttttagttgcctgcaccctgagtcatggcagaaaagggctgcccagctaactctgtggagcccgcctccctcccacctccctcgtgctgcctgtacgtttctatgttttcacaagttagagggtcagcctgttctgcatggggaaacctagcaaggacggccctgccccgctctgcagtctcgcacctttgggaccataagctcacatctgagtgcatccttattgagtttctgctctgctctcttccattggtcgctgtgttctcacccagtgctgtcttgcttacagctgctctatggtacttgtttgaaagcacagacagtttcttccgaggcctgcactagcctgctgtctgagatggcttctcttccctttggtttgcatcgctgtcgaggtcttctccttctctgcttaggctttgacccagggattgcctccttcggtcgtttgctgttggtgtgcagagcgcagtgcatggctcagggctgctccctctctttcactcagcccataggagatactagttcagcagtgcaaacagaagcaaattgcacgactgaggtattgcttctaaaaggattgaacactataaacttcaatacctatgagctgcatctatgaaacactatgataaggggggggaagtcattttataagcagtaaggatttgattcctcactgtgttttgtaaactgctctatgatgaactagctgaatgcaaagtggaaacataagccaagaattcagaagtcttttagttatgatgtgagatgaaacaatgttttgtttaatgacaagaaaagttcagttgtctattgggcacattatgtagcttaccctgtgcagagtgtccaagaacattagtgatttacccagaaatccaggtgttctgccagattgtgtcccccagtgacatatcaacagctgactgtgcacgtactgagagcatgtgcaagtctgctccattggggtggatgtctgagcattgcaggctatgannnnnnnnnnnnnnnnnnnnctcagccccataggagatactagttcagcagtgcaaacagaagcaaattgcacgactgaggtattgcttctaaaaggattgaacactataaacttcaaatacctatgagctgcatctatgaaacactatgataagggggggaagtcattttataagcagtaaggatttgattcctcactgtgttttgtaaactgctctatgatgaactagctgaatgcaaagtggaaacataagccaagaattcagaagtcttttagttatgatgtgagatgaaacaatgttttgtttaatgacaagaaaagttcagttgtctattgggcacattatgtagcttaccctgtgcagagtgtccaagaacattagtgatttacccagaaatccaggtgttctgccagattgtgtcccccagtgacatatcaacagctgactgtgcacatactgagagcatgtgcaagtctgctccattggggtggatgtctgagcattgcaggctatgagctcagacccttgacatggttaggatgcctgaaagcctcagttcaaaatggatctgagctacacagagtgggattacagtggaaaacacccatgttacacaaggacttggagccaactgttacctgctcctggcgtgcccttcatccctccttttcacatgactagcagaactgtgtacacacacacacacagagaagccttttttcctgtttttgatacatgtcaagctctgttgctcaagttaaactaacttataaccctctcaccttagcttcccaaatagctgagagtttggaagtgtgtccctgggagtatgggagtgtgtccttgtgccttagttatatatttaattcacctttattttacattacaccaaaaaaaaaataccaacatttgacagcacagaggaaggtctggaaatccttacactagcacagtgtaatacagtgctacaggcttccagctttccctccgtgtgtatctctagcatgctgagtccttctccctccctgtgcttctggctgcgtggttacatacattgcgtctgtgacttttatgatagctgttacccacacttcacatggctatctgaaaatttcaggagtcattgccatacaggggtcttctcagggttcctgcagtgtgcctttacctgtctggtctttgtcttcccatactagtgtgagaggcaactgagattgcttacgctcctctggggctgggccagggccttcacacaaaggtattcagtgggcagaaacttgttgctttactgattttcgtctctatttaattttaacttttaaattctatttgcagtgattttttttttgcttcttgttcttatttcagtttttctgaaaccttggagttggcagatgacatggccattgatattccccatatttggttgtannnnnnnnnnnnnnnnnnnncttacactagcacagtgtaatacagtgctacaggcttcccagctttccctccgtgtgtatctctagcatgctgagtccttctccctccctgtgcttctggctgcgtggttacatacattccgtctgtgacttttatgatagctgttacccacacttcacatggctatctgaaaatttcaggagtcattgccatacaggggtcttctcagggttcctgcagtgtgcctttacctggtctggtctttgtcttcccatactagtgtgagaggcaactgagattgcttacgctcctctggggctgggctagggccttcacacaaaggtattcagtgggcagaaacttgttgctttactgattttcgtctctatttaattttaacttttaaattctatttgcagtgatttttttttctcttgttcttatttcagtttttctgaaaccttggagttggcagatgacatggccattgatattccccatatttggttgtacctggctgaactggtcacccccatgttaaaagaaggggggatttccatgagagaacttattgtgtaagttgtgtttgttctgtttaatgtctgtcaaggtaaatgagtccacacccttccccattggcccctctgcacactcatgggcacagcctatagctgtttagcattccttttttaatagttatttttattttatgagcattgattagtgttttatctgcatatatttcttgcaacagtgtcaggtcccctaagattggagttacagacagctttaagctgccatctgggtgatggaaattgaatccagggtcctttggaagagccgccaatgttcttaacttctgagccatctctccagcctccttagcctccattgtcaaagggaaattgttgcattgtctgtagttgaagtctgttttaaggatctgagagacccttggccctttggggtggccgtctcagatcagagtccgggaggagattatttccggatgtttcttgttagtctgggtttgctctgccctactgagctgcaccgttgtattagaagctcacagttattctattttatttttttagttttggtttttcaagacaggatttctcagtatagcgctggctgtcctgtaacttgctttgtagaccaagctggcctcaaactcagagagatccacctgcctctgcctacaagaactgggattgaaagggacagcctcaggttagaaggacatcctgccctggttgtgaatgggcatcagtgccaccttgggttactaactagttcttctctcttcttcacgacactgttgtccctgcagcagttcttgagcctcctcttaaaggttcacaaaatatatattggcactttggggattgtgaagtcttcatggaaaagcaaaacaataaaaacagtttaagcatgatcttggttaattaaaagaacccttttttgaggaattatgatattaaccctagagaatttaggaaagacttgcttcactctgaaaataccatagaaacaagaaaattctgtcttaagtctgcttgtgcctgagccttaactgagcctcagcctttgctgtgacgccgtgggtaagtaagaggcatcctctccacttgagccattgaagtgcttacgtataaagacagatcctgggcttctgcgccctcctcctcctccactgaacttgaggtgaccagcaagtctgacgggctggcccgagtcctgtgtctgcacggaacagaagcgtgccagtgttcaccggctgctcctgtctttacagggaattcagcaagccattacttcctgttggcagagctggggtcctgctttctgaaatcctacaccttctatgcagacaaatggtgagtgccaacagtgtcagaccctttgaccacgtggtgggaagggcggtgacagcagtgagcttgggttctgtgaacagttccaggctcggtgtacaagtattcccgtttctttttgaccgtgagagaagagtatggccactgcttgacctggcttctgtcagaggtacatctgcccttctgttaccaacaactttgggaagaattacccaatcacagctagaaggaaagctgcgttctaagcagtctcaggctacatgttatttatgtcttgttttggaacaaaattaatatattacttttaataaatgtcaatttaaaaaactttgagagtggggctggacagatggctcagtgattaagggaacttgctgatcttgcagaggaccctggttcagatcctagcacccacatactgacaactgtctgtaactccagctccgagggttctgatgcccccttctgacctacatgcagttaaaacactcattattcataaaataaagattcacaaaatggtcgtcactcttaatacttttgataaagtactggtacagtcttcttagaaataagtggtaaaatgatagtgcaggagagttaattctttcagtttatcgcagttaaatatctgttattccaaagataaatgagcctccaaagtctgtgtaggctggaaagggagagagccagatgggaacctgtcaagaagaagtctgtggggcttcacaaaagtgtctactagaaaggggatgttggcacaaagcagagctcccctgaagatgctggggttcttgctgggatgggtctgagctgcaggtctggcgtgctaggttacagctccgtgggtttgcctttcaagttcttaacccagggcaacctgctcacgaccagagcccttctgtgttcattgtgaagctgtgtaaaatggagagatgctttcaacagcctgcttttggtgacttcctgttttgtgataaaactctcccatatagcactaaaatgtttactgagctattcttttaaattcagcattccttcttcagccttctttagttcttacttaaaatttaattgctataaactttcattttcagtaacagaaactaccacccacttctaaacaaaaccagatttttgatgaattttcatttggttttttttttgtttttttgtctttgtgtttttgtttttggtgggcttttgtttgtttttgttttttggtatctttatacttttttttatcatttttgagacagtctcaggacacagctagccccaaattgatggcagtcttcctgcccaccctcccaagtaatgcgacttacaggcatgcaccacactgctcagctaaaaccaggctttttcttggtcaagttgtgtgaggtcctcacctcatggcctagtgttttctcttacactgtgttcatgaggtggcaagcggacctgcttgtgtgtttccagctgagcaagactctttttttttttnnnnnnnnnnnnnnnnnnnntcctcactgtgttttgtaaactgctctatgatgaactagctgaatgcaaagtggaaacataagccaagaattcagaagtcttttagttatgatgtgagatgaaacaatgttttgtttaatgacaagaaaagttcagttgtctattgggcacattatgtagcttaccctgtgcatagtgtccaagaacattagtgatttacccagaaatccaggtgttctgccagattgtgtcccccagtgacatatcaacagctgactgtgcacgtactgagagcatgtgcaagtctgctccattggggtggatgtctgagcattgcaggctatgagctcagacccttgacatggttaggatgcctgaaagcctcagttcaaaatggatctgagctacacagagtgggattacagtggaaaacacccatgttacacaaggacttggagccaactgttacctgctcctggcgtgcccttcatccctccttttcacatgactagcagaactgtgcacgtctcttgtctccagtttgtacttttaaaaacagctgtatgtgaaaacagttggacaagccctgaactgtttgcactaagtcagaggttacagtttgagcccacttgtgactgtgtatacacacacacacacacacacacacacacacacagagaagccttttttcctgtttttgatacaggtcaagctctgttgctcaagttaaactaacttataaccctctcaccttagcttcccaaacagctgagagtttggaagtgtgtccctgggagtatgggagtgtgtccttgtgccttagttatatatttaattcacctttattttacattacaccaaaaaaaaaaaaaaaaaccaacatttgacagcacagaggaaggtctggaaatccttacactagcacagtgtaatacagtgctacaggcttccagctttccctccgtgtgtatctctagcatgctgagtccttctccctccctgtgcttctggctgcgtggttacatacattccgtctgtgacttttatgatagnnnnnnnnnnnnnnnnnnnntcggtcggtctgtctgtctgtctctctctgtctctgtctctctctctgtgtctgtctgtctgtctgtctgtctctctctctctctctctctctcacacacacacacacacacacacacacacatatttcagtaacggaaaatgagaaccttagcaaagacagctttttaatctgtgttttaaggctcctctatcagaagaaaatttaggtgtcaggggtactgtgtccatcacagcttgagaacagctctgactagccaagacagatgcgtgtacaacagagtttgtttgggcgacctgggctctctgatggaagattgtagcatcctggaagctcagcatgtttgtgatgtgatgtcacacacagatgaacaaggaggcagagttagctcgcctcagtaggagacgtctctgtagggagtagcctacaagccgtaagcatgttggagaaaggccgtggaggacataccttcctatgctaccagtattcacacatggcccagataggaagggttagccatttccctctgggtctgaagctgtgggtccctgacatggcatttacactctcagggcttccttcgttccctaacatcaggaagctatgcaggcaccgaggagcttgatccccaacacccattggaaaatgccaggtcatggtgcgtacttatctcccagcgctggggagtcagagagtgaaagatcaggaaagcttgctggctggcaagctagcctgattagtgagttccaggccagtgagagaccctgcttcaaaacaaagtagatggggtgttccttagagagaaacacaaggtttttctctggccaacacatgcatacccctacatgtacacatgtacacacatgactacacacacacacacacacacacttaaaagagaatacttaacagatcccataatccagaagtgaacttgctaagaggagatgagttctctcgcataagctgccagtgctctgagctctgtagacaggacaaggctatggtgccacttagaaggcagaaggttctagagaggcttactgttcccaaccccataagtaataattggagggaccctaaaactagaaccttgccaagcttgcctctgatttgacaggaaatgcagacattgacaagccagagtgcagcattggtgggctctgtactttcatactaaacaaacaaccagggaggaacgctaggttgaagctgttctcaagtagaaatgacaaagctcttacaaatccaagtcctgaaacacctgggcttgggcatcgcaccacacatggaatccccgtcctgggcctgagctaggatctgcaggctgaaatcagtcagggctacatgatgagatacttcaggaagcctgaggaagctaaagcatgctgtagcatagtcattaaggacataagctgctggtgcacatagccccagaactcaggagtcagacagggcatctccgtgaatttaaagatctccgtccagggctaccctatctcaacatacagaaaagaaacacagcagattaagataagtccaggcgttgagcccattcctctgcgctctgtggtgattgagatgtgcactatgggaaccccagctgttgaggagactgatacaggaggatgacttctttaccaggaattcgaggccagctcgattagtagacctaagtcaaagcaaggaagtgctgtctgaagacatcgtgtgggctgccgtggactcactgcagctgtagctgcagtctaggtgcactagggatgtgctcagtacagcctgcagctgtagctatggccgccccttgacctctgccgcccagtgatgggtcatagcatatgctactatacccagcgcaactcaagtatgtgtaagtcaagtatgtgtaaattatacatggaacatattcactcctctttaaagatttatgcattccttttctgtcagagtgttacacccacacgtctgtgcaccacatgtgtggctgttgccagagagggcaccagatcccccagaactggagttccaaacagtgaggagtcacgagttgtgtgctagaaacgacgcccaggtcctctgcagctcagccaaccaagccatgtcctcgccgaccccacccctattttttaatacatattatctaaaccacgaagagttcatttgcctagagtgaaacaagggaccacgaggaagaatgagtagtacgcctgttacatcgctcacttatatttagaagaaagagaaagctataaatcaatttgagcttcagccatataaagtgcaagctgcaggtcaggtgacctgtgtgttcaggaggctgaagctgcgcaatggtgtgaacctggcctgaggtacacagctgagcctgtctcagtcacaaaaggcagatgtgggagaggagggggttgagtgtgagttctgtgagcagggcacttgctgagctgggaagggcaaggaggaggcaggagagagagaaggtggacacaggccagtctagtctgagtggcagaaaggaaactgctaagccagccttgcacccagctaggcccagctccatgagactgagggaaggacgtctgtgagtggatgaagccgctctactctagccaggcagagcaggagcaagtcagagaaggcagcagggagcactactacaatgggacaggtgtcactgaattctgtcccaaagcgtgaggagaacgcctgagtgcctttcatgcagtacacttgttagccttcctgacgtgaacaaatgcctaggacagaaattgggtttgtcgttcacagtgtcctctacagaacactcaaggggccctggttttaaagactaaatagtggactccagagtgatgtcagttgtagaaaaccaatgaaggccacccatttccctgaagccacacaagccttggtccctgcactgatcggaatggtctgatctctgagttcaaggctagcctggccacatagtgagaccctgttgaaaatttgttcttgaacacaggaaaatgaagtgattgatccatatcaacctgtgctgcaggctaagtcaagggacactgggaagtagtgtagaatcatacacagttgttgtggagctgtcagatcggcatctggctacagttgcttgcccgttgttgatggtgatttaaggcacatggagagaagcatggtaacccagtccttgggaggtggagttagagggatcagggattaaagttacccttggcagcaaaatgagctggaagccagcctgggctgtgagaccctatgtcaaacccagcagcagcaaaagatgttacagtgaacgcaaaatgagctggaagccagcctgggctgtgagaccctatgtcaaacccagcagcagcaaaagatgttacggtgaacgcaggtctaacgaaagcctcgccctctgggtaccagggagaggtaacttacaggctcgaagtgagcactgcctttgtcagtggtaaagttctgttttcaagcccccgagccatctctctgtcccctaaatacaatctttttgaaaggttggaatctcatcggatactaatgaagtgacagcctttgacagttctgtcacagtggctctgttgctcattctctcaggccgagcgagactatggctgcccttcctctccatgtagtcaccacagtgaaaatcccaaggcctcgtgtagttgccacggtgaacaatgtcagtgtctcacgtttgcttccagaagttggacttcacggaatccgaagggccctgctcctctgaggcactgtcaaagaaggagctgtctgccgaggagctgtctcagcgcctggaaaagctcatcatggaggagaaagcggatgacgagcggatctttgactgggtggaggtacagacacgggctgtgctctgcggtctctgcagagtggccattgggtcctcagagttcacattgcccgtccttcatacctattacccttcatgcaccaggggcctttgtgcctgtatgtatgtggtgtctttgaaattcaaagaccggttttataactgctcagttgtttttactctttctatttttgttgttagatttttgagacagggtctcattatgtgtctggatttcactaagtaaaccaggctggcctcaaatccatgcccaggcagtttcaggcttgcttgcttgccttctttttttatactttgcttgttatgtatacagcatctgccagcatgcatgcctacacaccagaagagagaaccagccaccatgtggttctgggaattgaactcgggacctctggaagagcagtcagtgctcttaaccactgagccatctctccaggcccgcaatttcagtctttaacatgtaaaacctattcaaagcacaacccatttctctgggttcattagaattcattccacattctgtcacttgtatactatcccagataactttaattagcggcatgcagctactatgacatacatgggcttacattttcatggccttagtcttagagtctgccatgtgtttagcctgtttgctgtgttctttaagtagcagtgcttttccatgaagagcacttaacatgctttttatgaggtcacagaagcagagttgaggctacctcttttaagtctctcttctgctcttctagaatctcccttagcccactgtgtatgtcagctgtgagctttaaccactccaggcactgagaaatagagaccctggctttctccctgtctgtacagactaatcttttcttgaagtctttcgttctctcattttcaatcactgctagagagagagagagaaacttagtgttttattctttgtgtatgtccacaccacctgtatacctggtgcccaaagacgccagaagagtgttagatcactagaactggagtcacaagttgttatgaacacccatgtaggttctgggaatcgaacccccagtcctctccaaaaacagcaagttccttaactcctgagccgcctgtccagcccttaatcactgctttttcatgtgtgggtggcagccccgaatgaggatgaggatccaaactctgaggtttctttggctgagaggggggttttattgtttgtttggtttggtttttctttggtttggtttggtttcgatttttagtttttggtttttggaaacagggtttctctgtgtaaacagccctggctgtcctagaactctttatagaccacactggcctcaaacagagagatcctcctgcctctgcctcccagctgctgggattaaaggcgtgcaacattaccacgtgaccaaaccctatctatctatctatctatctatctatctatctatctatctatctatctatctatctatctatctgtgatttatttatttattttgtgtatatgagtacattgtagctgtcttcagacacaccagaagagggcattggatccccttacagatggttgtaagccaccatgtggttgcagggaattgaactcaggacctctggaagaacagatcctcctgaaatctttatgtcaatatccttatgggttattcttaccaaaagacagcccaggcttcctgcattcctttgaaagctgcttgtggtgtctgaacttggtcagcatctggcagccagcataggtcaggaagtgtattgcataggtagtgctgagacagtcacatgttacctggggtggccttcatactctgtctccaaagaccacctttaggtcctgcttctcctgccctacttcccaagtgctaggttctatgtggacagcaccattcagctcttgctgtttgtactcaggctctccctggaggccctccctcccacaccaaactcaaacctgtcctcagtcaggtaccattccagtcttgagcgcgctccagatttgggttcggtcataatatttgctgctctctttacatcatcctcagatttatccatcagggtctgaggggaactgaggggaccgtgggagtagattggtctcaggacaaaactacagttgtgactacggctctcccagtccttgggacactgctgtcccttagcttattccttgtcctccacttggctttgtggtcaccatttacattgcacccacaggggactgtctatcattagaacttcagaagccttgctggaactcaggaaagatccctctctgagatgccgtacactaatcaaattaagatggaaggttactttaacatggctacattttttgaatattactttctagtgtgactacagggtctctgcctaccactgtaacaatcagctatgaccaccagctagggagcagtctgggagacaagaggcagttagttcagtccagtgtgacagagttcaaatgttgggactctgaccccaactagtttattttaggcatatttcagtacagcgcaatgtggctaagactttcctggtaagaataactcaatctcatatatacaacaaagcttaaaatgtgattatatcaaacctttgtaaagtttaccttccatagcttctgtagattgtgtagattgacaagcttctagtgagggtagagcccaaacggtcaccagtgtccagtcccagccctttgggaggctaacaggtgtgcattctttgatttgaaggacaaccacatgtgctaacattcctggttcctccagtgcttctctgtgactcccacggcataaccattatctctttcctagtctttttcatctatttatgtataatttattcttggaaggtagctaagctaactactatgccaccgcagagttaattcttgaactcagtagcctcagccttggcctggtatgtaaggcatgccagatgttagagtttatgttttgcatcagtcccttcatgattttccatatgtaagtgattgtggtaattttacttttttgttactgttctttaaattgtaaaactttattataaattaatacttttccttaccaaaaacattgtacacatttgactgctcttatgttgtgatgtgcagtggtttctttagaattcaagttagttttgttttgttttgagaatttatacatgtcatgctattctttcccctcccccaactctccaaacctcccttcagtgcccactcagcttcagagggtgtttggttgattggatggttggtttgttggtccttctgagaaagtttctctactgtgtagctctggttgtcctggaattcactcagtagatcaaactggcctcaaactcacagagatctgcctgcctctgcctcctgagtgctgggattaaaggcatgctgtgccacaccctcctccttcatgttttatgtctgtgtctgttccagcaagcaggcttagcaggttcccatctctttccaactgttagatgctggaatttgggtaattggtcttatttgtacaaggtaggggcaatttgttttcttgtatccctggagaagggaagcctggtgcctcgtgattgcgtgcagagtaagaagctcctcccaccagagtggctgccggccagagcgttttcatagactgcacaaatccattgcaataacataccttctgttttcccctccaggctaatctcgacgaaagccagatgagttcgcctacattccttagagctttaatgacagccgtttgcaaagcagctatcataggtgagcaatgtttgttgagagtagttaagaatatctgaagtacaaattatcggctttatgttgtcttgaaacttgaagtttcatcatgtcatgccacctgctgtggcagtcatgggggcaaacagttaatctctccataagaaccaggtctgaatctagattttgttccttcctcttcatcctcaaggccatgtcttctattcatgaatttgaggctaacctcaaattaactgtgtagctcaggatggcattgaactccttattctcctccttatgccttgcatgtgttaaaattacaggtatatgtgaccaattctggcttatgagttaaataaatatcatgttgtataaacatcagtactatatgaaccatcaagctatagctccatctcctagtttggttttattgcatttttaaagtattggcttaaattcctacattattaattagtaatactttaattgacatgacaaattattatagtacatatttgaatattacacattgtaggatacacagtgatttttttaattaatttttttaattaggtatttttctcatttgcatttccaatgctatcccaaaagtcccccataccctcccctccccacagtgatgttttaataagcgtctacaatgtggacagtgtttagatcaagctagtcagcatacctgtcagctctcttgactttatgataagacctttgattaccttgaatctcttacgttgtcataaagtcttggtactgtttcattatacttacaaataaatgggtaaaagtctgaggggagtgtgcactcagcatgtttcccgccccctccccatgttttgtatcaggttttataaaatggaccattaaaaatgcactggtgccagaggcttgtagtcccagctgtctgcaaagctgaggtagcaggatcaaaagaaaaggggcctctaaggccactaaggaaattagtgagatgctgtttcaaaataaaacatccagagagggctggggatgttagttagctcagtggaaaatgcttgcctggtgtgtgagacacttggtccagaccccagtaccacccagcatggatagtctttgctttgggcccctttctcaactttcctagatgtgcctgtctgtctgctgtgcttagaacaccagaatggctctgtgataacacctggttcttctgcccctccagctgactgttctaccttcagagtggacactgctgtgatcaagcagagagtgccgatcttactcaagtacctagactcagacacggagaaggaactacaagcactttatgcactacaagcatccatagtaaaacttgaccaacctgccagtaagtttccatcttggttccccaattggggagaactggaggccttgaaagatgatttggagttaagacatggcattaggttagggaggcagaggccgttagatctcttgaatcccaggctagcctggtccacagagtgagttccaatacaacctgtctcgaagaaaacaaacaagcaacagaagaagtagtagttagggacaaaagagatggcttggtggttaagcacactggctgctttttgagtggaccctggggttcagttccctgcacctacaatgcccactcccagctatctgaaactccagtcctaggaggtcaagcaccctcttctagtctccatagccaccaggcatgcacgtgggaagatggacatacatgtagacaaaacacccacacacagtaaaatatttgaagaacataaagtataacttgtgggtggccagctcttccctattgtcccagcacatggtgtggctagggcacgaggaccataacctcaaggccaccgtgggctacagcatggtgggaatatacctgaaaaccaaaggaagaagtcaaagtagtgtagagcgctggtcctctccataggccaggtctatgggcctccttcacagggtctactctacgccatgtgcaagccggacaccctaagatgctgtggccgtggtgcaggctgagaagtgaatcttgcattttatttaatctccattaagtagccacatgtggacatactagatacatatacaacagccttgagcatggctgatgatctcagcaccctaagccactggtgtttaccaaagcatcagttatccaggcacacacatgcacgcacccaccctggtgttagatgctgtccagtgaactcttaacatctgcaggaagtttcacagactgtacacatgtctggagaggcttattgtgcgatggccccgagtggtccgcagatgctgtggcattgcgttgcttttcgtctttgaaagtgaaagtgcagggctggagagatggctcagcacttaagggcactgactgctcttccagaggtcctgagttcaaatcccagcaaccacatggtggctcacaaccatctgtaatgggatcctatgccctcttctggtgtgtctgaacacagcaatagtgcactcataaataaaataagtaattctttaaaaaaaaggaaagaaaagaaaaaagagaaaaagtgaaagtgctcctgagtctgaaacaagttattctcagagtttaataacccaagaggcgtccagtctgaatccagaggtatagccgatctcctcctctcaccagtatgtaagtcatttaacagggtggcagcttccttttctgagttgtacaggaggggacactagcttctcagatgacaggctgtctgatggagttggtgctgggtttacagtaggcctcctccttgtggagctgctggttgggaaaccggcccccatcagacttgtggcctccctctccatttccctgttggatatccagagctttgttgttgttgttagtgggagggaggcgtgatttatttcagtgttaagataatgtaattacaaatattaatctaaaaaagtttaatatggctctttctgactcgttaccaaaatttcttgttcatcatggcctcctccgttagtgtgatggtcaggaagctggcttccagcgaagcacataagtcacgtggaatggtgcacacatttatctcagcacttggtgggcagaggccatgggtctcttgagaattcagggccagcctgttctacataatgagcttgtggctagcagggcaacataatgaaaccatatctcaaaaggggatttaagagtccaaaatctagcccttaatcccagcacttgggaggcagaggcagggggatttctgagtttgaggccagcctggtcaacagagtgagttccagggcagccagggctacacagagaaaccctgtctcgaaaatcaaaaaaaaaaaaaaaaagagttcaaaatctagagatcaactctgcctgtgttgtcatagaaagtcagtctttgtttttaaatacagacttagaaaggggaaagttatacttgttggttttttttttttttttgcctctgcctcctgagtgctaggactaaaggcttgctccaccaccagcaccgttatatttaaattttaagtgtttaacttgataacaacataataacaaacacctttactagtatccaaacatagttgaatttgaacaaaataagaataaaaagtaatgttttgtctgcaaatgagtgttacattgctcagcaccaagagggtatagtgcacagtcctagggagtggatgttcattcactgtgctgattgactgcagccattcattcattcattcattcaccgaccacattcagtcactcactaattcacatgtctttgcttttccttgcaactacaatgctcacacctgcggctgttgtcacctcttgcagacttgctccggatgttttttgattgcctgtatgacgaggaggtgatatcagaggatgccttctacaaatgggagagcagcaaggaccccgctgagcaagctgggaagggcgtggccctcaagtctgtcacggcctttttcacgtggcttcgggaagcggaagaggagtccgaggataactaatacttcaaatacacaaacgaaacaaaagaaacaatttaagtatttttttaaaaagtttcacgtcttcgccaatcacagtgcagcaaggccaactctcgcagaaaccccacgtgtgcgcgagtgggagaggggacaggaatcaggtgatcatggaggataaaggtcctggaacaaggaaacagcaaacccgagggcgggcgctccaaaaccaaaatacatgtactatttatagaaaatattttctgttttaatcttttctttttaaacgaggactcatactttaaaaaaaaaaaaaaaaaaaaaacacatttagcaaaaaaaaaaaaaagaaaaaagaaaaagaaaaaaaaaaaacagttgaactttaatttattttaaggactgcaaatgccagtgtaatttttttaatttgcagtttctgtaaacaacttgtataatagaaaagcagagaaataaatttcccttcccttcagatgcaccgcacatttgtgttaaggcatagctgttagtcccgatttgagaaggtttggggtgaacgaggtaagaaagatcttttttcccctccccccggcccttttcttgctccactcccagccctatcttcagatctttctgcctctcagcttgcttcagaaaatttaaaaatcacactagtaatcaaaacatacataaccttggaacagaaggaagtactgtggaccagaaaaatccaagaattgttcaaaaaaagtgctaccctggaaaatacccttaataccgttgaaatcgttagagtaactttaaggcttgtaaatacatagaacaaatatttaaaaacataaaaaaggaattgactcaatactatttcttttcactttcaaaatataaggaacaaaataaagacgagcattgcaagtttaaaataaagacttctccttttgacagccgtcagctgattcccgtcctgggaggagctaggtgtttctgacggggtgtgtgcgcgtgccatgtgtgtatctgtctgttatggatacagagggtgccaatgcctaggtgtgggtgtccttggagtctaggaccagcaaacctgaaacagtccagctgtgtattatatattacaaccctgggtagcaggtcccccaggatgaccattgacttttaaatcccatcattcagtaaagagtcccaaaggagtgctggagaaggttcagtggttaaggtcacactgacccactgaccgcttttacagaggagccatgttgagagctcccagctctcacaggccgctcccaactgcctatagctccatctccaagacatccaacgccttcacacagatattcgggcactcaaagtaacaatgcacataaaataaaagtaaatcatttattaaaaagagaatttgaaaggtgctctttaaggaatgtaaaaaaattggtccaacacatggtaggagagaatcagtttctaaaatagccctctaacctctgctcctttgctgacactcagaagggcaaacacacacacacaccaactcactcatgcccacacagtgcataaagtctaaagctaaattctgctttgtagtaggaatggagcttaaacttctgcactcttcgcggaaaacctagtcactccgctgaacttccttcaggcccttccgtggatgggaagcctctgatggacctgctgggtcttatgtcagccgcagtgactgggccgtttgtttctgtcccctttcatgaagtagcactaggagatggagtctgtctcttggctttcaccctacaaaatgagtttaggaacacagccaggcagatcccaagtaaatattctttgtatttcatgcccatataatctaaggtttatgctggcttctgtctaacagcgtccacaggaggaggagacctaccgccggctgagaagcagaccgtttctttcccacagtggtaaagtgcttgctttggaccgggctgagcccagctcagaaccctagcatatgcagccacggagcgcatccctccgtggtgaaaagccaagtgctaaacgccaccttgacaggcatgtgacagggtcaggaagcagtttgggagcatctcagtgccttggaagccttagttacaaatgtcacctggttgaatggttaccgttgtctccaggacccctgtgtagaagattcccacccaggaagctcctactagatgcaggctttctgaaggatctgacagcactcttcagggtgctggtagggggatagtgactacatctcgggaatcagtggctgttcacattcatcactattataaatacaaatgtgtaaaaatggagaatttttagtgtaagggttggttaaaaaaaaaatcaggttcttaacgtgtctatcacaatagcagaaatctgtctgggatgctgtccagtgcagagccatcacacagtgcaaggtagcctttgggtttattgatgctgtgttgaaatgtttgataaaattagagccatttcctaagcagcatgtccttgccccagcagtcggggctacaggagggaggcaggcagcctaacctatataacaagggggtgggttggggggggcacagtagctaagagacttagacaaatctgaagacagagctcagattccccaacacctccataaaagccaagtagggctgcatgcctgcttgtaactccagcactgtgggaggcagagtcagaggcaggaggatcactgaggctaactgaccaccagcccttctgcactggcctctgcatgcatgtacacatgcaaaaaccagatggtgtgcttcctttattaatctgtgggacacagaagacttgcttcacactcaaggtcattctggactacatagtgagttctagtctcaacaacatgatacgtgacgttctgaacaaggtggaaacagaacctgtgcttttgttagccctgcacagcttcgggattgctgtccttcgggcctcctcctggaaagcagagtttggttggatccagtttgaaatgagtatggcatgctcgggtatggttagctcctgcctttaattccaaggacatggaaggctgacacagaagaatagctgcaaattcacgggcagcctgggctaaagggtgagagtcgacctcaaggggaaacccgggctgggacgtcttactggtgagagtgcttgctctgaaggcttgggaaccagagatcaaatctccagcatccacataaaacggtgagcatggtttcatgtgctggcccagccctgggaagtggtggcatgctgatccagagtgtaccgagaccagccgcaacagtggacgtttcggttcagcaagagatcctgtctgaaggcagaaaggcacagagcagagctcctaagacgctgcatcctcatcagacctctgcagatgctgcctgggtgcgctcactacattgtacgcatgtaacgtgcacatgagcacacacaacctgaaagcaaggatagacagctggcttgcctttacgccttcaagacacccgagcagtctgagggctgcgggtgtgactcgctgctagagcacagcaccgtttcccacacctttgacctctcaagcaggtatagcatttcactgattcattaggtgtctctgcggcactgaaaacggatgacaattatccagtaatggaatagtcgaaaggtgtcctatttagggagaggaagatatgccagttttgaaaatagtaaactaattttttaattcttgggtagaccagtaagccaggtcacaggtcatgaggtagtttattgagcagctaatcacaggctgaagacatgggcagggttgatgtccctaggacgggtgaggccctaggttctgttcccagcaccaacatgaacaacaaaactacttagcatcttctaagagccgaaagtgtttgaggagttcctgttctgcctacaaacaggaagctagggagggactcacactgtagttacagttacagtatatattgttgcttagttgtcacgtggcggaaacccttgtttttatcacttagactgtgtgaggtgcaacaggcatgcccaaccctcaacttgagaaggcctggtaagggtggttttagagaccaaggtctcagtgagctgcccttggcctttctcagaatctccgtctgcagtcatctgactcaaggacagagcttgccaggcacgccattgtgtgaaccacagaagacacacaacttcagccaagagacttagaggatgaagtgccaaaagtgttgtcctgcatgtgtgagacccaggccctacggaggggcgggggtggagagagaggagagagacatattgttcttccagacaagctttttttaaaaaaaagcattttttatctttatgcatattatttatgcatataaatactctatctgcatataaacctgcataccagaagagggcatcagatcatattatagatggttgtgagccatcatgtggttgctaggacttgaactcaggacctatgaaagagccagtattttcaacgtcctacatagggaaaatgacaggaattcttttcccttccagggtgacgtagacaatgcagtgtgaaatgttaccctggagctggggaatcagcacagtggctaaaaatgctccacaaaaccaaggacaggagctcagatcctcccagaacccacataaaagcaaggtggttgtggaagcttgcctgtgatcctgatccccaagagagggcattcccaaggcaagatgctgagctgtggggtcagtgagtgaatagagtgggaatggttgagtgctgtgcactgtgcacttgaactagcgaagccagtgatagacagctgtagtgctagctgttcacaggaccgcctctctctacccccatccttggaatacaggttagagttaaagttaggcaggcatggcatggggaggaggaaggccgcacacgtctgcaatcccagcactgggaagtggaggcagaggatcaggttatcctcggcaaagcaacgggatgctgtctcagaaggaagtaggaagaccgggcatgatgactgccaccttttatcccagcactcagaaggcagataagcctggtctgtctacatagatgcaggacagggctacattggccctgtcttggaacaaaaaaaacagaagttagctgggtgatggtggtccatgcctttaatctgattacttgggaaacagatgcagacaggcctcttgagtttgaggccaacctggtctacaaagggagttccagaacagccagggctacactgagaaaccgtgtctcaagaaaaaaaaaaaattagtgggggctggtgttgagttgttgcctggatgactaaattgtactggaaacctcaagtcgttaccaatgaagcaacaataagagctcaaacaggcacgagtgacttgctgccttgaggcaacttttaagaaacatgaatttttttctaaagaagtaagttaggccatcaaagaagctggcagcaaaaatgaccttgataggaatcaagacttggtactaggaaagagaggggaagcctcggctgtctgcaggcggtccttacgtggcttgtccaaaaaggaagaaaggtgggtagggcatggtgagggtccactcgagccccacccctatgccctgagcgatttgaatagcccttctaagagcagtccagatgggccttttctgagcaggtaagagaactctgggattctggtgggcgataacccatccaacactgcagttatctgcatacagtggagctgacaacccccagtgcctgctgttgtataaatacgaacattcctttctctatatatcactgtcttacctgcatgtatttagctgtatcacaggtgtgcctggtgcccttggagaccaaaagagtgtatcagaatctcttgaccctataattagtaaaattataaataattcttaaaaataaatggagtattgggagaaaaaaaaaaccaatctcttgacccatgttatcaggtggttaggaattgctatgtgggtgctggaaattgaacccagacctctggaagagcagttaagtgttcttaaataccaggctgtatctccagcccaagattttgtttttcttttatgtgtatacctctgggcagagggatgggaagcgtgcatgagtgcaggccagaagagggtttcagatggcctggcattacaggcagttgtgagctgataaggtgatgtgagtcctggaaaccaaacgctggtcctctgcaaaaccagaaagcactgttagtctcccagccagctctctagctcccctgctccacattgttactgcatttttgttttccatacacagatgctactgtgttaacagttgcctacaagtgctatagcagtgtgccgtacgggagcatagcctagggataggagggtgtactgcacggcacaagtgtggagtgagccaccccatcaaagttggggtagtgaaatcgcccagaacaaactatacccttaatcttttttttttttttttaaataactattgctgggtgtgatggtgcaaacctttaatcccagcactttgggaggcagaggcaggcagatttctaagtttgtggccagcctggtctacaaagtgagttccaggacagacagggctatacagagaaaccctgtctcaaaaacaaaaacaaaaacaaaaaaaaaaaaactattacattcatttgtcttgtgctgtgtcatgaattacagaggtcaaaggacaatttggatgagttaggatctcacctcccactaagtgggtaccagggactgaatgtagtttgtcaggcttggcagcaagtggctgtacctgctaggccacctgctgagccaccccactgcccagaagcttcaggtccccagctgtcaacagtatttacaaagcaaagatggtagatggagcagcctactcagtttgctggaatttcctcggtttaaaaactgaaagtctggcccagacatggtggcatgtgcctttaatcccagcactcaggaggcagaggcaggaggatcactgtgagttcaagctcaacctgttctacatagttcagaatccttttctttcctgttgcacccagggcctcacacatgctagagcaagtgctctgcagagctacgcaccaacgctagcttgtaagcctttgtcaaaagctattgggcgtagatgtgtttcagagttatacacttctatttattggggttcatatgtgtaaacgtgggagtcacttctctccaaccatattggtttctggagctccaactcaagttgtcagcctgttggctgactcctttactagctgagttatctcacctggattccagaattctgagtatttctgtctcttcctttaccctactagtgattgaacctaggccaggcaaatagcctaccactgagctatatacatccctaaccctggaatacaaaagttttgagaagaactttcaaggttgattattatgctaaaaaggagttataactatggccaccagtaaacggagaatgtgtaatggggaggaagggtgtccaggcatactgcttatctggcgtcagtgacatcacaaacaataacagaaactcccatgggccctttccctagcctccatttccttctctagatagatatggtcaattctgttactctcccatctcaagcgccagtaattgagagtcactgtccagtcttctggctggacatcaggaaaatcaagtgacacaccgccaaccccagtctcattcatactagacaccctgaaggaacccaagcctgaaactgcagtcctgccaccacaactcttgcaaagaaatgagtcactccattggaaacagaaacctctccctccctgacatccaaagtttattcttcagagctcttgaagtaaatatgagctatgactaagacggtaagcactgttctgtgctcagccttgtgactgcaccactgggttctgggctggaactctgcgagtcagtcagctgttacttcatctttatccatctttatgcctaactctaaagtcacctcctcttttctatacaaacatgaagttttagtccaacagacttttgtgtcctacaggtctacatctaaggactcgggagggagaaaaaaacaattattgccttaacaacaggctgtggattctgcaaaacttgctatatgctaagttaaacataccttagcttttgttgaaatctagagagtgactttctcagggtttgatttttttcaagacagggtcacatagccttgactgtcctggaactaagtagacaaagctaaccttgaacttcgagagatctgccccactctgccttctgagtactgtgatcaaaggggtggtcccattgtaccaggttccaagtattttcttgaaacgtatgacactcaggttttggcaagaacttggttttatgttcttgacatttttgtcctatcattttgctttcttctacataagagttgtttgtttgtttgtttttcttaaatcttaggcaaaactctgtatgtctctcaattcttattgggctcatcttgcatgaggtaggacttaaaaatgtgactttgaggccactctgatctacatagtaagctccaggccaggcaatgttgtattttataaaaatagagaaaccagggatatgtttgatagaggccaggtataatgtgagataagggggtgtctctgtgggcccatgctgaggcatcccttccccctgagagaccagccatagatggatgtagtgtatagaatagggtttattcagggcatggggaggggagttggaaggcagagaaagaggggggggcaggttatgaccatgtggagagggaggggcaaggggtgagaggtcagagcaagagcaagagatcgaggagggggcaaagaagcgccttttttagtgagttagacacacctggctattgccaggtaactgtgggacatagcctagatgaaatgccaacaggcaaaactacatagagagatcctgtctcaaacacggacacacaccaaatgtagcaagttcccaattatgccaatacataaaagtgggatggggacaggtgtctccgtggctgaggtcccttgctcttgtagaggatctcggtttggttcccagcactcacatcagacagcttaccacctactaactcaattcccaggagtgcagacaatccttagacatctgcacacacccggaacacatacaaacaggtacacacacatataaaaaattaaaagatggttttaaaacaattcttcaaaaagaccaaaatccctttttaatatttaaatttttttcatatgacatacttgatcaggtcccctcctctccaaatcctctcagatcctccccataaatccctttgaagagtttgcccatgatcccagtgttaggggaatgggtgatgtcactagtacagacgctcaccagggaggaatatttggtggggtgatttatttaatctacttagaacccttggagtttcagccactctggcaggtggagaggactgaaagtgtgtctaattggtttccgtaataagcgctttgattgacctgcagttgcggtgccatgcatgtaccaggccgatacccacaagactccggctacttgaggtacattgaatttttccaaagtggctttgaagaactacacctgcaatccttcatttccttttccttctttacacaggctctcgtgcattccaagctggcctcaggttggttacctacccaaaatggccttgaaatttcgatcctcttgatgccacctattgagtctgcgtcatcacactgggctctaggtgctggcgatggcacccagggctttcttcagactagacacatactaacaactaaactacttcttcagccccaagaactacaattttcaaaggcggtggtgtgcacattacatgaataggcagatctcaacgtaaagtgccaaataaaaggcgactcccttctaattccgtggtttcttttatgtgctgggggtggggaagctgtctgtgcatgcaaatcaagaagctgggggcagcccggctcacgcatcttccaggccgtgtatgaccagtccttgctcactacactgccaattccctgtggactcaggaagtggctgttgttgtctagcaccgtcttccagggctaaagggaggctggaaccccaaacccgaaggactcggggtcggagacagagactgcgccgagcacgcaggtacgcagccaggaagctagcgctcccagccacgctctgcctcccgtcgtccgccgttcccccccacctcccccacgagcgccctgtcgcgcccctgcgcgcccgcccggggacccacttggcgggcgcgcgcgggggcggnnnnnnnnnnnnnnnnnnnnnnnnnnnnnnnnnnnnnnnnnnnnnnnnnnnnnnnnnnnnnnnnnnnnnnnnnnnnnnnnnnnnnnnnnnnnnnnnnnnnnnnnnnnnnnnnnnnnnnnnnnnnnnnnnnnnnnnnnnnnnnnnnnnnnnnnnnnnnnnnnnnnnnnnnnnnnnnnnnnnnnnnnnnnnnnnnnnnnnnnnnnnnnnnnnnnnnnnnnnnnnnnnnnnnnnnnnnnnnnnnnnnnnnnnnnnnnnnnnnnntcctcccctcggcctactgtcaacttgtcttcaagcccggttcgaaagatgccggcactagtgagtggctgcggcgggcccgccctcccggcttctccgcccccgccgccgccgtggccgccattacggagtccccagtggtgagtgtgcagagctgaggccacgccggtcgccgctggtcgccgccgggtccccgcagccaggagcgcggcgtggtctctgcgcggtacctccgccgccgccctcagcagtcccgcgcccatctta

SEQ ID NO: 935 - DNA, 5638 bp, Mus musculus
tccaggattccacgaggaccggtgcagcagcctttggaggatcggctcttcccacctacggtctctgcagtctatagcacgaccccttatccctctggacagaatgcaggtccagccacattggtctatcctcaagcccctcagacaatgaactcacaacctcaggcccggtctccgtttttccagaggcctcaaatccagcctccccgagctgccatcccaaacagcagtccttccatccgtcccggtgtgcagacccccaccgccgtgtatcaggccaaccagcacatcatgatggttaaccatctgcccatgccgtaccccgtgacccaggggcatcagtactgcataccacagtaccgccacagcggccctccgtacgtggggcccccacagcagtatccagttcagccgcctgggccggggcctttttatcctggaccaggacctggggacttcgctaatgcttatggaacgcctttttacccaagtcagccagtgtatcagtcagcacctatcatagtgcctacgcagcagcagccccctccagccaagagagagaaaaaaactataagaattcgagatccaaatcagggaggtaaagacataacagaggagattatgtctggaggtggcagcagaaatcccactccacctataggaagacccgcatccactcccactcctcctcagcagctgcccagccaggtccctgagcacagccctgtggtatatgggactgtggagagcgctcatcttgctgccagcacccctgtcactgcagctagcgaccagaagcaagaagaaaagccaaaaccagatccagtgttccagtctccttcgacggtccttaggctcgtactcagtggggagaagaaagagcaagcaggccagatgcctgagactgctgcaggagagcccaccccagagcctcctcggacttcatcacccaccagccttcctccacttgcccggagttcacttccttcccccatgtccgctgcccttagcagccagccactgttcactgctgaggacaagtgtgaacttccttcctccaaagaagaagatgcacctcctgtccccagccccacgtcttgcacagcagcctcaggcccttcactaacagataacagtgatatatgcaagaaaccctgtagcgtagcgcctcatgatagtcagctaatttctagtactatcctaattaatgaaatgaatggagttggtgaaaaattatcagccaaggagaacactgtgggcatgctgagacaggaagtgctgccattgactctcgagttagagattctggaacatccacaggaagaattgaaagtggaatgtacgccgactcccattgccccgtccatgctgcctgccttctccccagctcctccgactccccccacttctcctccttgtcctccggttgtcctctctgccgccattgctcgttctcccgctgttgccactgaggtccagagagtcgccgacgagggagaaagcctgagaacttgccttagcaaggatgcaaaggagatgcaggacaaagcagagtcagaatcagatgggcaagcagaagagactgcggatccccagagcctacattcaggaaggagccccgccccagtgcaaacagctaccactgcgccaaagtcctggaagaaaacaaaagagcagacccgaaccccagatgaagtgttagaagcagaggcagagcctaaagccgaagaagagcttgcagttgacagtgtccttgagcctgagcaagagaagatgagccaagggtttccgtctgagagagacccctctgccctgaagagagggaaagctgaggaaggaaacggagaagaggctgagcctgtgcgcaatggcgctgagagtgcttctgagggggaagggggagatggcaactcaggctctgccgacagctctgctgatgggctcaccttcccgtttaaagcagagtcctggaagcctgcagatacagaaggcaagaagcagtatgaccgggagttcctactggacatccagtttatgcccgcctgtatccaaaaaccagaaggcctgcctcccatcagcgacgtggtccttgacaagatcaaccagcccagattgtcaatgcggaccctggatcctcgcattttgcctcgaggacctgacttcaccccagcctttgcagattttccaaggcaaacgcctggtggaagaggtgtgcctctgttgaatgttggacctcggaggtctcaacctggccagagaagggagcccagaaagataatcactgtctccgtaaaagaagatgtgcacttgagaaaggcagagaatgcctggaagccgagccagaaacgggacagccacgccgatgaccccgaaagcattaaaactcaggaacttttcagaaaagttcgaagtatcttgaataaactgacaccacagatgttcaaccagctgatgaagcaagtgtcggctcttacggtggacacggaggagcggctaaaaggggtcatcgaccttgtctttgagaaggctatcgatgagcccagcttctctgtggcgtacgcaaacatgtgtcggtgcctagtaacgctgaaggtgcccatggcagacaagcctggcaacacagtgaatttccggaagctgctgcttaaccgctgccagaaggagttcgagaaagacaaagcagatgatgacgtctttgagaagaagcagaaagaactggaagctgccagcgctccagaggagaggacaaggcttcacgacgaactggaagaagccaaggacaaagcccggcggagatccatcggcaacatcaagttcattggagaactctttaaactgaaaatgctgacggaggccatcatgcatgactgtgtggtgaagctcctgaagaaccacgatgaagagtccctggagtgcctgtgtcgcctgctcaccaccatcggcaaagacctggactttgagaaagcaaagccacgcatggaccagtactttaaccagatggagaaaatcgtcaaagaaagaaaaacttcctccaggattcggttcatgcttcaggatgtaatcgacctcagactgtgtaattgggtgtcccgaagagcagatcaggggccaaaaactatcgagcagattcacaaagaggccaaaatagaagaacaagaggagcagaggaaagtccagcagctgatgaccaaggagaagaggagaccaggcgtccaaagagtggatgaaggtggatggaatactgtacaaggggccaagaacagtcgtgtactggacccctccaaatttttgaaaattactaaacccaccattgatgagaagattcagctggttcctaaggcacagctgggcagctggggcaaaggcagcagcgggggagcaaaggcaagtgagtccgcaccttcagggtccccgtcggccacacccttagagtttgattcccgaagggcgttaaccagtcgtgggagcatgggcagggagaagagcgacaagccaattccagctggaacagcccgtcccaacacgttcctgaggggcagcagcaaagacctgctggacaaccagtcccaggaagagcagcgcagagagatgttggagaccgtgaaacagctgacaggaggcctggatgctgagcgggccagcactgaggccgaccgaagcaaaacgagggagctagcaaaatcggaaatgtgtgcagtgccagcccctgacaagcctgcactgtcagaagaggaagtggagaggaagtccaagtctatcattgacgaattcttacacatcaatgactttaaggaggccacgcagtgcatagaggagctgagcgcccagggcccactgcatgtgttcgtgaaggtgggtgtggagttcaccctggaacggagccagatcaccagggaccacatgggccacttactgtatcagctggtgcagtcagaaaaactcagcaagcaggactttttcaaaggtttttctgaaaccttggagttggcagatgacatggccattgatattccccatatttggttgtacctggctgaactggtcacccccatgttaaaagaaggggggatttccatgagagaacttattgtggaattcagcaagccattacttcctgttggcagagctggggtcctgctttctgaaatcctacaccttctatgcagacaaatgaagttggacttcacggaatccgaagggccctgctcctctgaggcactgtcaaagaaggagctgtctgccgaggagctgtctcagcgcctggaaaagctcatcatggaggagaaagcggatgacgagcggatctttgactgggtggaggctaatctcgacgaaagccagatgagttcgcctacattccttagagctttaatgacagccgtttgcaaagcagctatcatagctgactgttctaccttcagagtggacactgctgtgatcaagcagagagtgccgatcttactcaagtacctagactcagacacggagaaggaactacaagcactttatgcactacaagcatccatagtaaaacttgaccaacctgccaacttgctccggatgttttttgattgcctgtatgacgaggaggtgatatcagaggatgccttctacaaatgggagagcagcaaggaccccgctgagcaagctgggaagggcgtggccctcaagtctgtcacggcctttttcacgtggcttcgggaagcggaagaggagtccgaggataactaatacttcaaatacacaaacgaaacaaaagaaacaatttaagtatttttttaaaaagtttcacgtcttcgccaatcacagtgcagcaaggccaactctcgcagaaaccccacgtgtgcgcgagtgggagaggggacaggaatcaggtgatcatggaggataaaggtcctggaacaaggaaacagcaaacccgagggcgggcgctccaaaaccaaaatacatgtactatttatagaaaatattttctgttttaatcttttctttttaaacgaggactcatactttaaaaaaaaaaaaaaaaaaaaaacacatttagcaaaaaaaaaaaaaagaaaaaagaaaaagaaaaaaaaaaaacagttgaactttaatttattttaaggactgcaaatgccagtgtaatttttttaatttgcagtttctgtaaacaacttgtataatagaaaagcagagaaataaatttcccttcccttcagatgcaccgcacatttgtgttaaggcatagctgttagtcccgatttgagaaggtttggggtgaacgaggtaagaaagatcttttttcccctccccccggcccttttcttgctccactcccagccctatcttcagatctttctgcctctcagcttgcttcagaaaatttaaaaatcacactagtaatcaaaacatacataaccttggaacagaaggaagtactgtggaccagaaaaatccaagaattgttcaaaaaaagtgctaccctggaaaatacccttaataccgttgaaatcgttagagtaactttaaggcttgtaaatacatagaacaaatatttaaaaacataaaaaaggaattgactcaatactatttcttttcactttcaaaatataaggaacaaaataaagacgagcattgcaagtttaaaataaag

SEQ ID NO: 936 - protein, 1570 aa, Mus musculus
SRIPRGPVQQPLEDRLFPPTVSAVYSTTPYPSGQNAGPATLVYPQAPQTMNSQPQARSPFFQRPQIQPPRAAIPNSSPSIRPGVQTPTAVYQANQHIMMVNHLPMPYPVTQGHQYCIPQYRHSGPPYVGPPQQYPVQPPGPGPFYPGPGPGDFANAYGTPFYPSQPVYQSAPIIVPTQQQPPPAKREKKTIRIRDPNQGGKDITEEIMSGGGSRNPTPPIGRPASTPTPPQQLPSQVPEHSPVVYGTVESAHLAASTPVTAASDQKQEEKPKPDPVFQSPSTVLRLVLSGEKKEQAGQMPETAAGEPTPEPPRTSSPTSLPPLARSSLPSPMSAALSSQPLFTAEDKCELPSSKEEDAPPVPSPTSCTAASGPSLTDNSDICKKPCSVAPHDSQLISSTILINEMNGVGEKLSAKENTVGMLRQEVLPLTLELEIHPQEELKVECTPTPIAPSMLPAFSPAPPTPPTSPPCPPVVLSAAIARSPAVATEVQRVADEGESLRTCLSKDAKEMQDKAESESDGQAEETADPQSLHSGRSPAPVQTATTAPKSWKKTKEQTRTPDEVLEAEAEPKAEEELAVDSVLEPEQEKMSQGFPSDPSALKRGKAEEGNGEEAEPVRNGAESASEGEGGDGNSGSADSSADGLTFPFKAESWKPADTEGKKQYDREFLLDIQFMPACIQKPEGLPPISDVVLDKINQPRLSMRTLDPRILPRGPDFTPAFADFPRQTPGGRGVPLLNVGPRRSQPGQRREPRKIITVSVKEDVHLRKAENAWKPSQKRDSHADDPESIKTQELFRKVRSILNKLTPQMFNQLMKQVSALTVDTEERLKGVIDLVFEKAIDEPSFSVAYANMCRCLVTLKVPMADKPGNTVNFRKLLLNRCQKEFEKDKADDDVFEKKQKELEAASAPEERTRLHDELEEAKDKARRRSIGNIKFIGELFKLKMLTEAIMHDCVVKLLKNHDEESLECLCRLLTTIGKDLDFEKAKPRMDQYFNQMEKIVKERKTSSRIRFMLQDVIDLRLCNWVSRRADQGPKTIEQIHKEAKIEEQEEQRKVQQLMTKEKRRPGVQRVDEGGWNTVQGAKNSRVLDPSKFLKITKPTIDEKIQLVPKAQLGSWGKGSSGGAKASESAPSGSPSATPLEFDSRRALTSRGSMGREKSDKPIPAGTARPNTFLRGSSKDLLDNQSQEEQRREMLETVKQLTGGLDAERASTEADRSKTRELAKSEMCAVPAPDKPALSEEEVERKSKSIIDEFLHINDFKEATQCIEELSAQGPLHVFVKVGVEFTLERSQITRDHMGHLLYQLVQSEKLSKQDFFKGFSETLELADDMAIDIPHIWLYLAELVTPMLKEGGISMRELIVEFSKPLLPVGRAGVLLSEILHLLCRQMKLDFTESEGPCSSEALSKKELSAEELSQRLEKLIMEEKADDERIFDWVEANLDESQMSSPTFLRALMTAVCKAAIIADCSTFRVDTAVIKQRVPILLKYLDSDTEKELQALYALQASIVKLDQPANLLRMFFDCLYDEEVISEDAFYKWESSKDPAEQAGKGVKSVTAFFTWLREAEEESEDN

SEQ ID NO: 937 - DNA, 390183 bp, Homo sapiens
  misc_feature (1)...(390183): n = A,T,C or G
aggtgtgagctacagcaggatacctggctgatcccaccttttttttttttttttttttttttgagagacagggtcccgttctgtcacccaggctggagtgcaggggcacaatcatggctcactgcagcctcgacctcctgggctacagtgatcctcctacctcagtatcccgagtagctgggaccacaggggcgcaccaccactgcctggctaatttttgtatttttagtagagactgggttttgccatgttgcccatgctggcctcaaacacctgagctcaagtgattcacccaccttggcctcccaaagtgttaggattacagaagtgagccactgcgctcagtaggatcctacttccgaatgagaggataggatcacatcgtgagagacaccttagagaggtcgttccgtcttggccctgctgctcacttgcttgaggaaatccttttccaactctgtgctctgtgcctaaaccaggagcctgagaaaggtaatccttgagggtgtttccagcccgaccagtctctgtaatacttgttagaaattgtgctaaaacacacatagcaacacttaccatcttaagcattctatgataatactttttgctctcttttgcatcctaatgaacctgaactatctaaggccactgtggctggaagggctgtggtcaactctaggaattgctgacagctgtaagaatcacacgtgctgtgggcaaagaggtaggacagcttggctccagaagtgagagtgatgttaaatcaaagaagctgaaacttcaccctgaggggaatagggaaggaagtaagggttgctgagctgcctattgtgccctaggccctgttgacagtctctgcagacaagttcctttacttcttgttctaatctgttagaggctgacttaccttcatttggcaaatggtccacagaagttaggaaacttacttagggtggtacagcttggtctataaggttagaatctggatctgtcttatagccataaaaggaaccaccaccctcacacaccaccatatatccctgggccctaaggcatttggaagggccaactggctcagctctatgcagatgagcatttgtggcccatcatgaacgtacttgcatacggggaatggagctaaatctttacttttcctactggggtttctctccttcctccatgtctatttcaggtgggagccccacagtctcttcttcctttatatttattttttaaagacagggtcttgtcttgtagcccaggctggaatgtagtggtgcaaccatagcttactacagccttgaactcctgagctcaagagatcctcttgcctcagcctcccaaatagctgggattattggtgtgtaccaccatgtttggctaattatttattttattatttacttatttacttatttttgagacagggtcttgttctgttgctcaggctggagtgcagtggtgccatcatagctcactgcagcctcaaactcgtaggctcaagtgatcttcctgcctcagccttcccaatagatgggactacagacacgtggcatcatactcagctaatttgtaaactctttttgtagagagagcaactcactaggatgcccaggctggtcttgaactcctggtttcaagtgatcctaccccctaggcctcccaaagcattgagattacaggtgtggaccacagtgcccagcttcctccccgccacctccttttttttctcctcttcctcctcctttttcttctcctccttcatcttctttgttttctcctcctcctgcttatcttcttcctccttttcctccttctcctccttccttttttttttttttagacggagtctcgctctgttgccaggctggggtgtagtggcgcaatctcagctcaccacaacctctgcctcccaggttcaagcgattctcctgcctcagcctcctgagaagctgggactacaggcatgtgccaccacacccagctaatttttgtatttttagtagagacggggtttcaccttgttggccaggatggtctcaacatcttgacctcgtgatccatccaccttggcctcccaaatcccaaagtgctgggattacaggtgtgagccaccgcacccggccgtccttcctttttaatctctttggcctcccatctctatgccttaattaccttgggtctagatgtattctcagcaggccttggtggacgtttgcgtatttctgtgcagagcatctaatgatactcaagtctctctgggctaatacaaatggcttctcttggcataacatggcttgcttttaaaggccagtccctccaggaggaaaatgaaagggtcagagaactccaacttgccacaacattttggaaagttttttatttttatttttatttttttggggggggcgggtgatgaactttacccttagggactggaaagtttagattaccaagtcactttgttcaaaaagactttgttgccaggacacagcaaaccaaggctcatggacttaattaagaaactaagtagtccccctgggtccaattctcagctcactgaggcaaacagagccatgatcccacatggtaacaagcaacacaccatcacccagctatgaggaaatgtacaagcttataagctgagtcttcatctgtcatctagctctttgggaatgttggtctttgacagaggctgcactgggctctgggaacagtagatggctggtcaaagacacaatgcccgtctcgtgggctagcagggcctgctctaggatactcttgcttttctctctccctgtgcagtgagactcagtctggcctcttgtgtgactcagaacttctccagggtaacaccaaatctttaggcaattcacgattattcagtcattcagcaaatttcacatcctatttattgagtactagatgtcagagatattttaaatgactaagtaatctctggccgggcacggtggctcatgactgtaatcctagcactttgggaggccgaggcggacagatcacctgaggttgggagtttgagaccagcctgaccagcatggaaaaaccccgtcgcttctgaaaatacaaaattagctgggcgtggtggtgtatgcctgtaatcccagctacttggaaggctgaggcaggaggatcacttgaacctgggaggtggaggttgcggtgagccagagatcgtgccattgcactccagcctgggcaactagagcgaaactatgtctcaaaaaaaaaaaaaaaaaaaaaaacaaaaaggctaagtaatctccctgcataaatgaaaaagaaatagctaaaacttatccaagaattactatgagccagggactgagctaagggttttgcatttgttttattaattaattaattaatttcttgagatggagtctagctctgttgcccaggctggagtgcagtggtgtaatctcggttcactgcaacctccacctcctgggttcaagcgattctcctgcctcagcctccaaagtagctgagattactggcaccgccaccacgctcagctaatttttttatttttagtagagatgggatttcactgtgttggccaggctggtcgcaaattcccgacctcatgatctgccggcctcggcctcccagagtgctaggattacaagcgtgagccactgcgcctggccacatttgttttattttttatgataactctaggaggtagaacctctttattttacagataagaaaaccaaggcttggagaaattaagtgcgttctccaagatcatacagctaatcaatggtagggctaagaatcaaactcaggtcatttgctttcagtggccgcactcgtggagagtgccctgagagttttaagcatccactgccaaggggatctagaggaagggtccctagttcagcttggggagtgaaaaaaggctgccttgaggaggtgatgcttgagccaaaccttgaatcaggaattagccaattggctaaggggagtgaggacggtttagggatacagggagcagcagcaggctgcacatgggccccagggcaaggagaatggtttcatttccaatagaccaaggtggctgcagctctgaatttgaggtggagtgtggcagattggaagcagagcccagactctgaaggactttagatttagattggatcctgaaggtgatggtaacaggaaagttaacaaaatcagcttttcttgttgacagtacctctggccatagtgggtaggttgctatgctgaaggcaacctggcaaatcagacctagagtcagatgccttgggtttgaatccctgtacatttacttaaaagttatgagaattttcacatctttgaatctcagtttttaaatttgtagaagcagggagtggtggctcacacttgtaattccagcactttgggaggccgaggtgggcagattatacttgagcccaggagtttgagaccagcctggattacatggtgagacccttgtctctacaagaaaatacaaaagttagccgggcatggtggtgcgaacctgtagtcctaactactcaggaggctgaagtgggagaataacctgagcctggggaagtcgaggctgcactgaaccgtgattgagccactgcactccagcctgagatcctgtctcaaaaataaataaataggccaggcacggtggctcatgcctgtaatcccagcactgtgggaggccgaggctggtggatcacttgaggtcaggagtttgggaccagcctggccaatatggtgaaaccctacttcttctaaaaatacaaaaaaatcagctgggcgtggtggtgcacacgataatcccagctactcgggaggctgaggtgggagaatcgctagaacccaggaggtggaggttgcagtgagctgagatcgtgccactgcactccagcctgggagacaatgagactctgtctcaaaacaacaacaatgcatatatatatatataacaatatatattatataatatataacatatatattacatataatgtatatattatatgtaatatattacatatattacgtaatatatgttatatattatatgtaatatataacatatattacgtaatatatgtaatatattatgtaatatatattatatataatatatattatatataatatatgtaatatattacgtaatatatattatatataatatatgtaatatattacgtaatatatattatatattatgtataatatattatatatattatacataatatatatattatatattatatattatatattatgtataatatataatatataatatattatatattacatataatatattatatgtaatatataacatatattacataatatatgtaatatattatgtaatatatattatatataatatataatatatattatataatatattacataatatattacatatattatatattatataatatacaatatatattatatatattatatattatataatatacaatatatattatatatattatatattatataatatacaatatatattatatatattatatatattatatattatatctgctgcttgatatatataatatataatatatattatatataatatattaaatatataattaattaattaattaataaattatataatatatatatatatgcaagtgnnnnnnnnnnnnnnnnnnnnagcactgtgggaggccgaggctggtggatcacttgaggtcaggagtttgggaccagcctggccaatatggtgaaaccctacttcttctaaaaatacgaaaaaatcagctgggcgtggtggtgcacacgataatcccagctactcgggaggctgaggtgggagaatcgctagaacccaggaggtggaggttgcagtgagctgagatcgtgccactgcactccagcctgggagacaatgagactctgtctcaaaacaacaacaatcatatatatatatataaaatatatattatataatatataacatatatattacatataatgtatatattatatgtaatatattacatatattacgtaatatatgttatatattatatgtaatatataacatatattacgtaatatatgtaatatattatgtaatatatattatatataatatatattatatataatatataatatatattatataatatattacataatatattacatatattatatattatataatatacaatatatattatatatattatatattatataatatacaatatatattatatatattatatattatataatatacaatatatattatatatattatatattatataatatacaatatatattatatatattatatatattatatattatatctgctgcttgatatatataatatataatatatattatatataatatattaaatatataattaattaattaattaataaattatataatatatatatatatgcaagtgaggtctagacttgagcaaggccattctttgggctgaaagaacagagctctacctttttgactttgttccctacaaacttcctccattgattgcctgtggccagaatcttatcagggacttttacattattttgcccaaggtctatccattttaaaacagataagtttcataaagtgcttagctaagactggcacacagtaattgtctgatgcttgtagctattattaagttagaaaatgaagctagctcagaaaagaataacaattaggcaattatcggcctgttatcaccctagtgtaaatgagaagtcaaataatttccttggaacaggttttgattgggataaggatgcctgagattccagaaaatgaaaggagaatctggggaactgaaggaccactagggaattcttcctggagccaattatatgtggagaggagcagaaaatcccatcctaaataatcaggtgttacaggccgggcatggtggctcacgcctgtaatcccagcactttgggaggccaaggcgggcggatcacgaggtcaggagatcgaggccatcctggccaacacagtgaaaccccatctctaccaaaaatacaaaaagagaaaaaaaatcagccgggcacggtggcaggtgcctgtagtcccagctacttgggagactgaggcaggagaatggcgtgaacccaggaggcagaacttgcagcgagccaagattgcgccactgcactccagcctgggcgacagaacgagactgtctcaaaaaaaaaaataaataaataaaaaaatcaggtgttacaaatccagacagtttaagatgccacagtatgaagtagctgctgtcttccagtctggagatggggatgaggcatccttttcaatgtcagaaactgtggagctctagctagaaagacgccgtaggggggttgtggtatcactctctttcagatgctcttttatcctagaaggagcatttggggctcccagggattgtcacgaattaagcatccactatgtgtagagctttatatgaattaaaaacaacaataggccaggcgcggtggctcacgcctgtaatcccagcactttgggaggccgaggcaggcagatcacctgaggttgggagtttgagaccagactgaccaacatggagaatcaccgtctctactaaaagtacaaaattagccaggcgtggtagcgcatgcctctaatcccagctactcgggaggctgaggcaagagaatcgcttgaacatgggaggcggaggtttccgtgagccgagatcgtgccattgcactccagcctgggcaacaagagcgaaactccgtctcaaaaaacagcaacaacaaaatagtaaggcagtgtgtgaagcaggatagcaggagtcagaactagactctaatcttagctctgccagccacactgtcggtgcgacctcggggaagtcttttgtgcgttttgagcctcaattttctcagcttttctgtggtttgatggtattgagcctccccagtctcagtttattcatttgtaaaatggatactacctatttcacaggactgcttgagataatgaagggtacagcgcttagtgccatgtctggtaaatattatattaaaacttgattgctccatgacgcctgccattttttttttttttttgagacgaagcctcactctgtcgcgcccaggctagtgtgcaatggcactctctcagctcactgcaacctccgcctcctgggttcaagtgattctcccgcctcagcctcccgagtagctggtgcctgccaccacgcctggctaatttttgtatttttagtagagacgaggtttcatcatgttggcaaggctggtcttgaactcctgacctcaagtgatccaccggccttggcctcccaaagtgctgggattacaggcgtgagccaccgcgcccggccgatgcctgccattctttcccactcaatgccactgtgcttaggacaaggcacctgctaaggagtggggtgtgcggggttgggggtgggagtgatcttggcaggtctagctgggaagaaaatccttatcaacaaatgtcacccagcataggacattggggagctgatcactggctgctggtcaaagggcgctccagtcctggggaaggcctaggtttgaatccatccacagagctcagttaaggctgctgattagatatggcggctcaggtcatgtccccagccaatatgggaggcggcaaggttcatccagatgaaggtggcatttagatttaggctctgtcctttcccgatagggtgaccttgggctagtcacttttcctctgtgtcctctggaaatggggctcctcattcacctctcagagcgtctgaggaagtgtcgacacaatgggtgtgaaatgcgtgggttacaggccggcgggtggcattggttacgcgaagtccccgcggggggtccctatccaacgggttccattccggttaagcggttccttctccaggggtttttcgcctcgccgctgcctctccgcccctgcgagcggggctcagcgaacagccgactccggggccattaccattgttcttcgaggctgggccgcaggggaggactctcgcaagccagacctcgcctttggtctttccctccgccccgcacccgcgccgctgtaagccagcgaagcctccctcgccgatctttgccgaggaagcgagttagcccctgagccctcccgaacggcggccgaggacgcacccgagcgtctccgaagaatcccgacccctagcagtctccggaaagagccgaagaggcttcccaccctcggtttcccgagccattccgaaaaagtccgaagttttccgagcagccgtcctgccggactgctggaggcggccacagcgccatgttggatgctctgctcgttgagtgaagaaaatccaccggcatcgcctgagccccgctaccgagaagggcgccgcttcctccggggagggggataaagatcccccgccgccggcccatgaggatattgccgtgaaaggtccggtctctccgcctcctgcccccgccgggtccggccccccccctggggtcgcgttgtcacggagaccggcagccggtggtgctggcccgcggggcggctgctgctgccggcggcggcggcggcggaggcggcggcggcggcggcggcggcgtcgggcgtgtgtgaccggccccggccccctcctcctcctccccccaggctccccccagccccccgctcccgccgcctccccgggtctgcccccatcccgcccccccgctgcccccggcccctgcaccccggcgcgcccggtcccgctctgggggggttggtggcttcgctttgccatgagtttaccgcagaaaccggctctgaaatcaggcacagcgactgcagcaggaaccggacccggcaccggagcggcggcggcggcggcagcagcggtaccgcctcctcacccggcggcggcagcagcggcggcggcggcggcggcggcggcggcggcggcagcggtcccccctcctcacccgaacatcagggccctccagactcaggcgccccaacagtatccttttcaccttcctgtcggcccttcggttctcgtcgtcgcagtccagggggaccccgcagcccaggggaccctcctgccggccgccacagcccagccaggaaagggacagcggctcaagcccctgcatcgggcttgggcggagcttttggggtgccccggcagcagcactgcggggggacccccagaccctctgcaatactgtgaaagctagccccacttggccatgcttctgcagccccttccttttagagcttggggtcccttctcccctcctcccctaaggtaccctccccccctttattgggcagaatttgcttggtgcctgggaccaaccctgcagggaaggcttttctctggttgttgtgaggattacaccctcctgctcttcacctcccctcggctccccctacagcgggacacagtgggcttccataattattattagtacataataaactttatcggtaaatttcttgtttgaaaccaatcagctcgtttccgaggtatgttggattttcagtctaaggtgaaaatgtacagaaagcagttcctctggataattttttttagtaatgggagagttgtgatgtggtttgtggtagagatctgaggaggaaatgtgacgccggacgcttccctgtctttgacctttttaaaggaagaggaagttcaccgacattacccatcacccacaaaagtctcacttcttggaagatttgtgttaggctgaatatttttaatgggctttaatttactcctcataggcctgatgtctagagagttaccagggcttctggaggaaagtctagtattgaatgtttctaatttcatgttatttgctcgattgtagaattttggagagctttgattgaaaagacttggtgatggggtattttagtcaaaaactagccggtgaaggtaaaacgttgaattcatgtattccacggagatttagaaaggtattgcgtacctgagaataacatttcatcatgcatcacctcctccctacacccactgtatttgtgtaaatcaataaataatgattggatgttagatgtgttgtgtttttatgtttgtgtcatcgtgcgtttgacttttagagattgtaggatgtttgagcaagtaagaagctaactgctgtgaggtccccagattatttcacagtctgtagtttgattcttgtctgtatagattactttgagaagggaaagcaatctcccttctagagtcatttcaggtcattgtttgttttctgccaagtgtcattttctctgttctttaaacctagttcgtgattttcaatccaggcaccgcggtgcagtgtaaagataaattccattccagtgtgacgtgtgtactgatttcataatgtttttatcctgcatgattctgttcaattaggaattgttcaccgatgagaaagtgtggtgataacttagcgttgcttatggaaaacctggttggttttgttcagtgtctctggggtgggggaagattggctggtttgcctacttaaaggcagagttcagtgttgaatcttttaaacctgtctttgcttactactttgtgagtttaaattcctttctaatttcattttttaccttgattgcctatactcggttaggacttttaagtttctgaattgtgctaccacgtaaattactcattacctgcatctttgagctgttttggcaattgaacagaaataaaaggaaacctgtagtaggtgtccttgatgtacagagtagtaaggaccacagtgctgaatgtgacactgtttggtgaattgggtggctttttgggatacagctgtgtttcaagtatgctttttctcagtgcatttcatagaaggacttataaaagctctgagttggttgcaacattcaagtagttacaaaagctgaaacttaattttcttttgaataaaaagcacttgttaaagagataaatttaagtgtaagttccagtgtagataattttaaaccaattttagtcatatggaacacttacttttgtgtggctttaagtttttactttgcctcatgccattgaagctaaaattaatcttcctcttgatgtgtttcacagctcttattgttttctctttgcttttacacactgaaaggttacaattgctaaaatagaaaattttattatataaacagtaaaggaagtataggttgtagatttcatcagacataccagtggtgaagtgttatcaactggtaatggggtattgattaaaaaaggattgaaatagagcagttctacttttctaccctgagggagtatgggaatttgtatttgacgcaagtggtcattgttcaataagtggataacatttaagcatcttggcaggagtgcatagctggagttagcactgttcatggcttgaatagatctccagaccctcaaagtatgtgggtatagttgtgtttgcattgaattaataagttcagacagttttatttatttatttttgagacagagtcttgctttgtcgcccaggctggagtgcagtggtgtaatctcggctcactgcaacctacgccggctggattccagccattctcatgcctcagcctcctgagtagctgggattacaggcgtgtgccaccaggtccaggtaattttttgtaaggcgtgatcagactgggtttcaccatgttgaccaggctggtctcgaactcctggcttcaggtgatccgcctgcctcagcctcccaaagtgctgggattacaggcattgagccaccgcacctggccctgatctggtgaaacctggtctctactaaaagtacaaaaattagctgggcgtggtggcgcctgcctgtaatttcagctactcaggaggccaaggcaggagaatcgcttgaacccacgaggcagaagttgcaatgagccgagactgcaccactgcgctccagcctgggttacagagtgagactccacctcaaaaaaaacaaaatcaaaggtcttctagaaaatgtttggaacccacgtcttttttttttttttttttttttttttttgagattgagtctcgctctgttgccaggctggagtatagtggcatgatcttggctcactgcaacctccgcctcttgggttcaaacgattcccctacctcagcctcctgagtagttgggactacaggtgtgcgccaccatgcctggctaattttttgtattttagtagagacggggtttcactgtgttggccaggatggtcttgatctcctgaccttgtgatccgcctgcttctacctcccaaagtgctgggattacaggcgtgagccactgcacccggccgagaaccacatcttaagtcaatggagaggattcctgtaatcccagcactttgggaggccgaggtgggcagatcatgagatcaggagatcgagaccatcctggctaacacggtgaaaccccgtctctactaaaaatacataaaattagccaggcgtggtggcaggcgcctgtagtcccagctacttggtaggctgaggcaggagaatggcgtgaacccgcgaggcggagattgcagtgagccgagatcgctctactgcactccaacctgggtgacagcgagactccatctcaataaataaataaataaataaataggattgccacattttgccatttatattgaggcttcaatagatgtggcaagtttatgaattcattaattcagcatccactgtgtgctgctacactcagtgctagatgtaggattgaagagctaaggtagaaatctttgccctcaaagaacttggtccttttgggtagaggtgggtaaacaaaacgtcatgaggcaagtacagtgataactgataactctgctgtgagagtagtctggggaaggaggaattaaggctttctaaaagaagttgacatctcagctaaattagaagaatgagtaagaattaacccaggtttacatagctttctcttctgccggcctgctttttccaattccattgctgctccatagaattttaataaatggatttcagtcacgtttcaggcttttttttttttttttttgctagaggaggtaccagagaaagtgacagtcaaacacaagctaaaaattcaaagtattttctgtatcataatctaaggaattagtgtatgagaaggagatacatacctgatctgatctgtggtgggtcttttcctggtctccttcccagtgcatctcgtaatatccttgcccttttaatactagactttggcttagaaacagtacttgctagtcttaaaatagaagtagatttaccttggtgtattgagaagtgtacctgatttggaggcaaaaaatctggttttgagtttggctctttcattgtagtagatatcttatcttagactaaccatgcaactgcttcaggcattggttatcccttctctgaaatgtagggtctagactcatttattcagtgaccttcttgaattataattgcttatgattgtcttttgagatttgtgttattcttgcaagtggagaggagggatttacagaaaccagttaatgttttctttgtctgatggtaagtgacatgttctgtggtggcttattgatattagaagatactaacatggggcagaggcagaggcaaagcagcagtttgctcatataagctacttctggtttttggcttgttaatgttagattcagccacagagacagaagcacctctctaacttcagtggtgaagactgtatagttagttgtgagatagtgggagaccataaaataaggttgccatggtcatttgctggcttgttctgggtgatgatacagttagttcattatgagatatgagggaaagtaagttctggaataaactcccgtggtgctgtggtgagacacaatctatttttacctaaggaataatactttgagctaatataataggaaagtaactagttcctgattattagccacgcatatgactttaagcaatggataaactgcagctgagacttacacggatgagatattgcaggatcccaagcgacttctgaattctcaaatggcttccagttctttggcttgctgccaaccaaaggaatttttcaatctcctgtagctcagctgaaatttgagaaagttaaactattttaagtgcatttgaaatttgttggtttttacgacttttttttttttaatttatttttttagacagggacttgctctgtcacccaggctggagtgtgatcttggctcactgcaacctctgcttcctgggttcaagtgattctcatgcctcagcctcccaagtagctgggattacaggtgtgtaccaccacacctagctaatttttgtatttttagtagagatggattttgccatgttggccaggctgctcttgaactcctgacttcaaatgatccatccaccttgacctccccaagtgctgggattacgggtgttagctactatgctctaccatgatctttattaactaataattgttttgtacttttttttgagacagagtctctgtcgcccaggctggagtgcagtggcgcagtctcggctcactgcatcctccacctcctgggttcaagtgattctcctgccttagcttcctgagtagctgggattacaggtgcgcgccatcacacccatctaatttttgtatgtggggtacaggtggggttttaccatgttggccaggctgttctcgaactcctgacctcaagtgatccacccatctcagcctcccaaagtgctgggattacaggcatgagccaccacacctggcctgttgtgtacttttttgagcccactgtgtgctgcctgactttataagacattgaattttgttaatagaatgtaaactccatgaaggcagagatttttgtttattttgttcactgtggaattgctagcacctagaatactgcttgacagacagtaggcagtctgtaaatttatttgtttgtttgtttgtttgtttatttatttatttatttatttatttttgagatggagtttcactcttgtcgccctggctggagtgctagtggcacaatctcagttcacttcaacctccgcctcccggattcaagtgattctcctgcctcagcctctagagtagctgggactacaggcgtgcaccaccacgcctggctaatttttgtatttttagtagaggcggggtttcaccatgttggtcaagatgttctcaatctcctgatcttgtgatccgcctgccttggcctcccaaagtgctgggattacaggcttgagccaccgtgcctggcctgtaaatatttattaaataaaaagtgtgttggactttgggaatcaatttgaagataagttttaggattaatatagatggcatcacaactcacttacagcattcaaagctgccctcaaattattttgcagggatgtataattgaattgaaaataattctgtaatttcctttcagatggaatagcattgacccagtttacaaagccatctgaagtgcctgagttgtatttgaagtacatattgatactgaggattagggttggtatgaaggccaaagaggaacaacatctgtagtcaaatattattattaaaaacttatgattataagagcaagacataattaaatgagaaatttggaaaaatatagaaaagtaaaaaatcactcataatcttattagtggagacaaccccttttattttattttattttatttatttatttttttggggggagagagtgttgccctgtttcccaggctggagtgcagtggcacaatcttgggtcactgcaacctctgcctcccgggttcaaacaattctgcctcagcctcccaagtagctgggattacaggtgcatgccattatacgcagctaatttttgtattttgggtagaggtggggtttcaccatgttggccaggctggtctcgaactcttgacttcaggtgatctgcccacctcggcctcccaaggtgctgggattacaggtgtgagccaccgcgccttgccacttttttaaagaggtggggtcttactctacctcccagggcatggtcatggctcactacagccttgacctcctgggctcaagcaatcctcccacctcagcctcccaaggagctcggaccacaggtgtgtgccaccacacctagctaatttttttgtagagatggggttttgccatgttacccaggctggtctcgaactcttgggctcaagccacctgctcaccttggcctcccaaagttctgggattacaggcatgtgtcccagtgtgtagctgtgataaccacttttaacattttggtgtatnnnnnnnnnnnnnnnnnnnnnnnnnnnnnnnnnnnnnnnnnnnnnnntacctagttttgtatcttgcttaatttgctacctaagtatctgccatgaaaagtactttttttggccaggtgtggtggttcatgcctgtaatcccagtactttgggaggctggggcaggaggatcacttgagtctaggaatttgagaccagcctgggcaacatagtgagaccccatctctaataaaaattaaaaaatagtttgccaggagtggcagtgcatgcctgtagtccttgctactcaggaggctgaggccggaggattgcttgagcccgggaggtcaaggctgtagtgagacctgattgtgtgattgcacaccagcctgggtgaaagggcaagactgtcccccaaaaataaaaagagatacttttttttttaaaaaaattgagacggagcctcgctctgtcacccaggctggagtgcagtggcacgatctcagctcactgcaaccttggcctcccgggtcaagcaattctcctgcctcagcctcctgagtagctgggattacaggtgccctccaccacgaccggctaattttttgtatttttagtagagacggggtttcaccatgttggccaggctggtctcaaactcctgacctcaagtgatctgcccacctcagcctcccaaagtgttgggattacaggcgtgagccaccacacccagccaagagatacttcttgaatagttttattctgtatctacttgaaatataagtgaactttttgtttatttggaatgcttttcttgggaatattttttcacctttggcttttagcttagaagttatgactgcacattacaaaggggaatgttcaaacctttatcagtaagtcaaacatcttttgagttattgttcctgtaatgttttgcattatttgcaagattaaaactcagtgtaacatcacaagtttttttcccatacaattatttacatttctttattatctctttaagttcatctttatatgttcaagtatactaagtttttaaaaaagcctgggagccagagtcctaatttttttttttctttgtgacggagtctcactctgttgcccaggctggattgcagtgttgtgatcttggctcattgcaacctccacctcccgggttcaagcggttcccctgcctcagcctcctgagtagctgggattacaggcacccggcaccacgcctggctaatttttgtatttttagttgaggcagggtttcaccatattggcctggctggtcttgaactcctgaccttggccttccaaagtactgggattacagacgtgagccactgcacctagtgtatttatatattggccaggctggtctcgaactcttcatctcaggtgatccatctgcctcagcttcccaaagtgctgggattacaggcgtgagccatcgcgtctggcatttagttggttttcaggaagtgttagtatcatgaggagtgattgaaggaaggaggaaaagaccacagggattcatgcgggatgagggaaagaggattgaagtgtgggaacaaacataattttggaataaggagagaaaattaagtgggaatagaaaatgaacacagccagttttaaaccagaatactatttttacattgagaatggaaaggactgaaccttgaaggttaaatgagatgattcctgaccttttttctaggtcctagtaattagtatgtaagaaatagaacttggtcggagaacttggccaggtgcagtgactcatggcctgtaatcccagcacttcaggagcccaaggtgggtggattgcttgagttcaggagtttgagaccatcctggatgacatgacaaaaccccgtctttacagaaaatacaaaaattagccaggcgcggttgcacgtgcctgtagtcccagctacttgggaggctaaggtgggaggattgcttgagcctaggaggttaaggctgcagtgagccatgattgcactgctgcactccagcctgggtgacagagtgagaccctgtctcaaaaaaaccccccaaaacaaacaaaaaaaacccttaattcatttatttattttatttatttatttttttgagacagtcttgctctgtcacccaagctggagtacagtggtgcgatctccatctcagctcactgcaacttctgcctcccaggttcaagcaattctcatgcctcagcctcccgagtagctggggattacaggtgcacgccaccacattggggcaatttttgtatttttagtagagatggggtttcaccataataggccaggctggcctcggactcctgaccttaagtgatctgcccctctcagcctctaaaagtgttgggattacaggcgtgagccactgcgcccagcttattcattttttcgagatggggtctggctgtgtctttcaggctggagtgtagtggcataattatggctcacagtagccttgacctgctgggctcaagcagtcctcctgcctcagcctcttgtgtaactgggaccacagacacactccgctatgcctggctaattttttaatttttttttttttttagagatctcagtttgttgcccaggctgatctcaaactcctgggctcaagggatcctctcgctttggcctaccaaagtgccgggattacaggtatgagccattgagcctggcatggaagtatgaatttttaaaaggaaaaaaaagagtttaagactatagtcagggtttagataggcagaggtgggtggattatgatgagtgggtgatcaatatgaacaaagatttgggcctgaagcaagtgtagtgtatgctgtgttctaaggatttggatctgtgtgcttggaatggaggattctcatggtagaatattcaagataatggatccagattctagagcattttgaataaataagaggaagttagacttcagctgtgtgaaaccattacttttttaaaaaacagctttattgagatgtaatccacataccgtatgagtcacccatttagagtgtataattcagtggttttgggtatattcaaaaccagttgagaattgtacaactactaccataattttagaatatttttgtcactccccaaaggaacctgtttgactccccatgactccccattttcccccagttctccctgccctaggcaagtccaagtctattttctgcctctatatatctgcctattttgaactttttacgtaaatggactaatgtattttttgtgtgtgatttgtttcagcataatgttttcagggttcgtctgtgttgtaaccatgtattagcacttcatttttaaaattattgagtaatattccatgtaccatggacatttgggttgtttcaactttttggcctttggataatgaatagccaaaaggttggataaaatttctggctctgaatgatgttgctgtgaccgttcatggatgtttttatatagatgttatgttgtaatttctcttgagtatataccttggggtatagttgctgggttatatgaggtaactccatgtttaacatttggaggagctgccaaaatgttttccaaagtggttacaccattttatgttcctgccaacaatgtatgaggatttcagtttttctgcatccttgccaacacctgtcattatttgtctttttgattataggccatcctattgggtgtaaagtggtatcctcattgtggttttgatttgcgtttcccctgatggctaatggagttgagcatgtttttgtgtgtatttggccatgtttgtgtgcatttggccatttgtcagttacggagaattatactatatatataccattgcccagttgttaattgggtcatnnnnnnnnnnnnnnnnnnnnnnnnnnnnntgcagcctcgaactcctgagctcaaggagccctcccacttaagcttcccaagtaactgggactaactgcatgtgtgcgccactacacccagctactttttgtattttttgtagagacgggatttcaccatgttgcccaggctggtctccaactcctgggctcaagtgatctgcctacctttgccttccaaaatgcgggattataggtgcgagccaccactcctgcctagttttttattttcggtagagacagagtctcactgtgttgcccactcgtgtctcaaactcctgagctcaagtgattctcctgccttggcttcccaaagtgttggaattacagacatcagccaccccgcccagccttgtgcgttaaggttatataatccattaagtgcttgagatttagtgaggtgtgctatttataaaataaggcctattggataaacgaactttgaccatttctatccttttttatgcccggaaaacaagtgttgtctgcttttattattaagataaattactattaggcagtggtagttttgtaaaaaatagagtataagcatttgactgttttgctgtcctgtgaataattgaaattatgagttacaaattcttaggtttttggattttgcatagtgttagttctgtcaggttaaaattggttgttgattgatatgaggttatactcccaggctattctaatgtatatgttattataaagaaacaaaattggagctgggcacagtggctcacacttgtaatcccagcacttcgggaggctgaggcgggcagatcacctaaggtcaggagtacgagaccagcctggccgacatggagaaaccctgtctctactaaaaaaatagaaaaattagccaggtgtggtggcacgtgcttgtaatcccagctacttgggaggctgaggcaggagaatcgcttgaactcaggtggcggaggctacggtgagctgagatcacgccactgtactccagcctgggctacagagccagaccctgtctcaaaaaaacaaaacaaaacaaacaaaaaacaaaattgggaaatactgcttaatctcttgtttagcaggattctttttgctatttaggaaaagaccacattaaagaagaggttattttgttacctttaggtgtaataaaaacagtttatttgttttggataaagactttccacaaaaaaactcttcagttgcttaacattgggaagtgggaatgagtggagttgctgattttgtaagattgtatctgctttaagttttaaattattatgcatgtctccagcttagctcttactcaatattcaaaggaagtgggtcttaattagtccatgtataattttaatggcatcaagtacctaattaataattgttgaatctttgaggctaatgtagtcagctgatactccctgtgttacattgttgatctttttcagaaatattagagtttgaaagtagtccaacttcctggaataaatgctgtttcaaaagcagactacagagcacttgaccttagcttattaccttttatattgtgtgactgagtgagtgtatttaaatgtggtacattttaggtaaggcaatgaaagctgagtgtggctctggaatgtcattgatttcattcttgatcttcattagaaaaatcatagttaaaggatccaaacataagtatgcattagcttatttttcctttacacatagtagacagtaaatttaaaaagaagtgtctttgaagggtgccaccatgagccagtgatttttctaagctggaaaggagtttggggatttttctggttcagctttctgccccctctcctacctttgttctagaggctgaggggaggttagggcaacttgcctaaccataaagttcatgccaactcaaatttatttgaggtctttaacaacactgaccagtgacctactaatagatcctgtttctcctgtaatggtcctggtttggatagtaaattatatggatacccccacctggtaaccattacatagcttagacaattaggaatctttttatttatttatttttttttggagatggagtctcgctctgtcccccaggctggagtgcaatggcaccatcttggctcactgcaacctctgcctcccaggttcaagcaattctcctgtccttcctcagcctacagagtagctggcattacaggtgtgcaccaccacactcagctaagtttttgtatttttagtaaagacagggtttcggcatgttggccaggctggtcttgaactcctcaagtgatccacccgcctcggcctcccaaagtgctgggattacaggtgtgagccactgtgtcccaccttttttttttttttttaagatgatgtcttgctctgttgcccaggctggagtgctgtggtgtgatctcagttcactgcaacgtccacctcctgggttcaaatgattctcctgcttcagcctctggagtaactgggattacaggtacccaccaccacacctggccaatttgtatttttagtagagacggggtttctccatgttggccgggctgggctcgaactcctgacctctggtgattctgcctgctttggattagtttagatatcattagtttattataaaagacagacatggaaattatttacatgatgaatgatttcagaactttagtggaacgggcagcttcacgttgatgccatttcaatagtgatttatttcagtttacatactttccaagagtgtcaccatctctaaatgaataatccttgtcatgtagagctgctttggcacctctatattctggaagaactttatctccaactttttttttttttttgagacagagtttcgttgttgttggccaggctgcagtgcaatggtgcgatctcggctcactgcaacctccacctcccgggttcaagtgattctcctgcctcagcctcctgagtagctgggattacaggcactcgccaccatgcttggctaatttttgtatttttagtagagacggggttgcaccatgttgattaggctggtctcgaactcctgacctcaggtgatccacccgcctcggcctcccaaaatgctgggattacactggcgcatgagccacggcgcacggcctatctccaacttttacactgactggttgaatctctctctaccctttcgttcagagcctgacccagcagctactgctgttgcttgccatacttttctttgagatttttctgaaaggataatgcttcctttggttacgatttcagtggcacttgtttttctttttcttttctttttttttgagatggaattttgctcttgttgcccaggctggagtgcaatggtgcgatctcggctcactgcaacctccgcctcccaggttcaagcgattctcaagcctcagcctcctgagtagctgggattacaggcatgcgccaccacgccctgctaattttgtatttttagtagaggtggggttttgtcatgttggccaggctggtcttgaactcctgacctgaggtgatccacccgcctcggcctcccaaagtgctgggattacaggcatgagccattgtgccaggctggcacttgtttttcaaccaacgctcagtcaaagaggaagaaacttctttatgagatggagtctctctctcttgcccaagctggagtgcagtggtgcgatgtgtgctcactgcagcctctgcctcccgggttcaagtgattctcctgcctcagcctcctaagtagctgggattataggtgtgcactactgcttctggctaatttttgtatttttattagagacggggtttcaccatgttggtcaggctggtcacgaactcccgacctcaagtgatccacccacctttgcctcccaaaatgttgggattacaggcctaagaaactttctaaatgcttttcctgccatgactcccagcactacacgtcctactctgccctcgtactgtgctggaaggagagacccctgatgtcctttttctgtttcaggattctaattgcatttagttatttctctttattctcttatggtttgtaacgattcctgcgactttccttatcttttgtgactttgacacttttgaagattgctgatccattgtttatagggtgtccctcgttttggatttgtttgatgttttctcatgaatggggcgaggttatgcattccttctcattgccccatatcaggagattcatgatgtcagtatgatgatgattaccttgactacttggttaagttggcatcttgctggtctttctattgtggagttattctctttccttttgtagttgataagtatcttgtgggagatatttgatgagtttgcaaacaatgttagaatcttctcaaactttggttctcaattttagcaactgatggagcttgtctgcaacatttattgcttttgtggttgcccaattgtgactttctatttcactctttccttctacatttattgattataattctatgaggaaaagctttctttcctccatttttattattcatatcactatggactcatgggtatatattttattttatgggttaaaatccagtaactatcattgtttgttttcttactcagattgttctagctttggccatcaggaattccttcaggttgatttctgtgttctttcaagaagccattatcttttttttttttttttgagatggagtttcgctcttgctgcccaagctggagtgcaatagcacaatttcggctcactgcaacctctgcctcccaggttcaagcgattagcttgaacacagcctcctgagtagctgggattacaggcacctgccatcatgcctggctaactttatgtatttttgtatagacggggtttcaccatgttgcccaggctggtcttgaactcctgacctcagatgatccacccgcttggcctcccaaagtgctgggattacaggtgtaagccaccgcacctggcatctggataatttttcagttttttgtagagatagtcttactgtgttgcccaggctggtctcaaactcccagcctcagttgatcttccagccttggcctcccagagtgctaggattacaggcatgagccaccatacctggctcactgcagcctccacctcatgggttcaaacaattctcctgccttagcctcccaagcagttggaattacaggcgtgcgccaccacgcttggctaattttttttgtatttttagtagagacgaggtttcgccatgttggccagtcttgtctcgaactcctgacctcaggtgatcagcccgcttcggcctcccaaagtgctgggattacaggcgtgagccaccgcgccagcctttttttttctttttttttttttaaacccttgctctgtcacccaggctgaagtgaagtttgatcatagctcactgcaatctcaaactcctggactcaagggatcctcccattttagcctcctaagtagctgggactacaggcacacaccactgtgcccagctaatttttaaaatttttggagagatagggataggggtctcactttgttgtccagtctgatcccaaactcctgggcttaagcaatcctcctgcctcggcctcccaaagtgttgggattataggcctgagccactgcacccagcccttgtttttttatttttaagctttgccaacatctgagttccccgacaatcgtgttcttaattcttgttaatatgttattagagttagaaaggattccttcttatattgcagataaaagaaggaaatgtgtagaaggtttttttttcttttttttctttttttgcccttttttttgtgcctcaaatctgaaggccttttatgtatagattgtactaggacctgcagatctagtgtctttactcatcataggtaacaattggatttagcgagaaaatataggtatttctgtttttgagtttcgttaacagcaaattgtttagatgggattaaaggcccaaaatgtactctagttatctttgtggaacccatggatgaacacctatatatatagagagagagtgtgtgtgtgtatgtatatgtatgtacgtgtgtatactcaccgttggactcaaactcaggtaattctactgcctcagcttcttgagtaggggggattacaagtgtgtgccactgtgcctagtttatgttgtgttttagtggtgttaaatcttgtgtaccaggtcagaataattgttttagttggaggagctaagttgaaataagtatttggttatcataagttacagttcataagcactttaaaaataaccccttttcttcaattaactatatattggcttggtgtgttggctcacacctgtaattctaacactttgagaggccaaggtgggtggattgcttgagcttaggagtttgaaacccccctgggcaacatggcaaaacctcgcctctaccaaaaatacaaaaattacctgggcatggtggtatgtgcctctggtcccagccactcaggaggctgaggtgggtggattgcttgagtccgtgaggtggaggctgcagtgagtggagatcgcaccactccactccagcctgggtgacagannnnnnnnnnnnnnnnnnnnnnnnnnnnnnnnnnnnnnnnnnnnnnnnnnnnnnnnnnnnnnnnnnnnnnnnnnnnnnnnnnnnnnnnnnnnnnnnnnnnnnnnnnnnnnnnnnnnnnnnnnnnnnnnnnnnnnnnnnnnnnnnnnnnnnnntctcatgctttcagtgctttcagtgacattgaagctttggtcagttcataagggcaccagtgtgaaattagttcatgataaggacaattgtgagaaacctccagttggtcaaatagccttcggaaacttactgctcattattctttctgatttttcttggaatattttgagagaaaagtcattattcccttgtatttcagaatcatgttaatgaggtagcttaactgctattcagctgcaggctcaactgagtgaaaaaggacaactagtaatggtaaactgaaggaaagactagtggaatcttgagaaagaataagagaaaaaagagaaatgttattgttttgatattacagattaagctaaccacagtacctgattcttagcaggtgcacaataattatttagtcaataattaatggagcaaatatttattaagtaacattgtatgtctgtgctgtctattgaagaatatacaaaagaaacctgaggctgggtgtggtggctcacacctgtaatcccagcactttgggaggctagacagaaggagcacttgagcctaggagtaggaagaccaacctgggcaacatagggaaaccctgtctctaccaaaaaaaaaattagccaggtgtagtggtgagcaggagggtcactctagcccaggaggttgaagctgcagtgagttgtgatcataccactgcactccagcctgggtaagaaagagagcaagatcttctcttaaaaaaaaacaaacaaaaaaaaactacaagaaaaaaacagtactctcaaatggaggtacgagatcagaaccttgaaagtcagtgaggactaggggaataggaagtagtatttgggctgacttgaagttgaggggaaggacatctacagttgagggaaatggtatgggcagagtcgtggtcagtggttaggaaatggtgtatggtgtatatggggtagtccgaagatccactgggataaaatagaaagcagcaaatgtgcatctgacaattttggagaacctttggatatctaactgtataatttattattcatttattattattttttgagatagggtcttgctttgttgcctaggctggagtgcagtggtacgatcatggctcactgcagcctcgacctctcaggctcacgcagtacttctgcctcaacctcccaagcagtagggaccacaggtggtcccaggttgatattttgtagagacgaggtttcactatgttgcctagcctggtcttgaactcctgggctcaagcgatcctctggctccagcctcccaaagtgcgggattaacagatgagagccactgtgcccggcctaatttttccaaggttttccaaggttttgctgaggtacatcctgtctagagggaaatgaaaaggaaagggtgatcatatcatgaaagctatcataaaggaagaaaaatagggatttgactatctttgatttctgaaagaagagttaaagttgactccagggttttgagactagaaaatgatgctgtcattgatagagtaagaaagatgtaggatttaattttatacgttgttttgagatagtggacagataaattcagtttaggacatgttggatttgaaatgagtgaaatatccaactcattttacaaacaaatggagataactgaagatgtttggaaatagggagatggaagtcagatgagcagaaatggttggaaaaacaaatctgtgataatataagcataatggagagagggaagagaaaagcaaagattattagtctatgcagtgtctggttacttgaggaagatgaggaagcttacagaaaagagaaagaagctgctgagaggaaagaggaggatcaacgcagcacaacctttaaactatccagaatagattcccactgagttttgtttatgtaattggaggaagtgacatttaatccttgatagctagtttttgattgaaagctcttgagtttttttttgttgttttttttttttttgagacagagtttcgctcttgttgcccaggctggagtgcaatggcgccatctcagctcgctgcagcctctgccctcagggttcaagcgattctcccatctcagcctcccgagtagctgggactataggcatgtgccaccacgcccagctaatttttgtatttttagtagagatggggtttcaccatgttggccaggctagtcttgaactcctgacctcaagtgatcctcctgcctcagcgtctcaaagtgctgggattacaggcctgagccactgcacccggctttttgtgtgtttctttacaagtctaaaattagttcttaaagggctttggtttggagagttacatttaagtttatacttttgcttattttctataatcatatattttagaaataaaaaaacttctcaaaatatttatttatttattttttagatggagtttcactctttcacccagggtggagtgcagtggcgctgtcatagctcactgcaaactcccaactcctgggctcaagcaattctcccgcattagcctcccaagtggctgagattagaggtgtgaggcaccgtacctgactaaaacttcaaaaatatgtaaatcacttgctgtctccctaataggctgctgttggggttctgggcagtagttactgtgaaatcattaatttgaacctggagttttcaataaaagattttaatatgctaatcaggaattgaacagagcatgataaactccattactatccttagttgataaattttaagcagaagaaaaggaactgtttcagttagcttgtctttgcctcattattgtggattgatgtataatttctttctttctttttttttttttttttttttttttgagacagagtctcgcactgtctcccaggctggagtgcagtggcacgatcttggctcactgcaacctccgcctcctgggttcaagcgattctcctgcctcagcctcccaagtagctgagattacaggcacctgccaccatgcctaggtaggttttgtatttttagtggagatggggtttctctatgttggccaggctggtcttgaactcctgacctcaagtaatccacccgcctcagcatcccaaagttctgggattacaggcgtgagccactgtgccccgctggcctatatatttaaaaaatatatttctggtttcagtttcagcctttgtttatggttagtcacaggtttgtagtagatagtttataagtgagtaaaattgaggcatattgtttcaatactcaaataatgagacaatagtgaaaatacctgctcatcaaaatgtaggacatcttttatcatactgctaaagagatatatagatggagagatacatagatgcatagatacatagcatatatctgcatctccttattaatagttcagctagaatttgaaatattaggttaaattggctgcctttgaatgaaaaaggaacttctatttgtgttcagggtataatgctcagatgaaccgttggatatgcaaccagaaagcagttaggaagtgtttttcagtttagtctttcactggaaaccaaaactttgaaaaatatatttggagcggaggctacttatgacagaaggattcttaaagttcaactacttttgactcagaaggaaaactaagttgaaaatactcaaaaccagaaaaatagataatttcgtagaatgttgcaggttgttttgcctttctggctctcacaaaaaaggttagtgattgatactgtatctgcatattttctattcctttctctgtactttagttaatagcattttgtgattaaaaaaaatacgcccttgacttacttttcttgttgttattgaaagcagtttttcctgtgtctgagcatgtataacattagtgatctatatagagagtttgtttattgcaaccagaggcacattcctagggaagaatggtttttgaatgttccgttatcttatttccagtaggacatctttagaaatgagcaaattccattaaactaataaccctgattttggtggataagcacttatactaattctgctttgagaaaagagattgttcactctgctttaggagctgctggctaagtctggtgcttcttaacctttaactaagaaaaatgaggcttgctgacaataggtagtttttactggcctgtgaaacccaacagcatgttcagcaatgtaaaccacagcagctatcttttgctggcttcactgttgtttgaagtataatgaaatgcttcttggccggtctcggtggctcacgcctataatcccagcactttgggaggccaaggagggaggatcacctgaagtcaggagttcgagaccagcctggccaacatggtgaaatccagtctctactaaaaatagaaaaattagtcgggtgtggtggcacatacctataatcccagctactcaggaggctgtggcaggggaatcacttgaacctgggaggcggaggttcccctgagccaaaattgtgcaattcattgcactgcagcctgggctacaagagcgagactccgtctcaaacaaacaaacaaacaaaaaaaagctgcatctcacaaattgctgtacctgctgactcatcttcaagcccctaaacaaccatagtatccagcattattgaatgctgggacttgagaataaagagaaccagaatcttagaatgcgagggttagaatggattatggaaatcttttaactcacctccttctcaaatggtctcagctattaaaaataaatgttactgtggtagctgtcatagtagatagttaaaagaatgatagtgctattcagaatgccgttagaatcttctagatgagtgaagacttttgtctgtctaagagtctttgagatgtagtctttgagatgtagtactttttagcttcccttcaaaaataacacatcctgaaagtggccgaaagctactaggggcagcacacatcagtgtctgctatacacttcaggagaactgtgggaagaagtaaaaatgaagagtggccattgtccctgaaagtttcttaatctaattagaaaatagatttgagaaaggagggaactttggagcatttaggaatcattttgtgattatttaaaaattattttggaaacagcatattcctttgtttcccaggctggagtgcagtggctattcacagatacagtcacagctcactgtagcctcgaactcctggcctcaagccatcctcctgcctcagcatcttgagttgctaggatgacagagtgtgtacatcgtgcttggcttgaatggatcttttacctgtgtgtgattttgtaatatcatgcattggttatttggaagattataccattatgcatcagttatttgaagataattgttcattaagttatgtaaattttccaaatgttgatatattttattatatggcataaaataatgttattaatagctaataccgcaatgacctcatagggaaagtattttgggaagctctctgggtcatggtagtagataccagctcactgtgacttgtaatgactggaaaggtaattgaagttgcattaggaaacagtctgggagttgaagggaaatggattttacttttataaagaagcttcatgttgaaggccctgtaagggggcgttttatttttctggttttttttttttagtgttagcaagtttgattccatctaaggagtacgtaacaaaaagtagttggccttttcaaatttgtgaacccaaagatttttttaaaaattttatttgcttttttttttttttttttttgtagagacagggtctcgctctgttgcccaggccagagtacagtggcatcatcttggctcactgcagcactgaccttccaggctcaagcaatccacctgcctttgcctcccaaagtcttgggattataggcgtgagccactgtgcctggcccaaaggaatttctgtgatggaatgtatagtgtacttctgagcttgcctgctttttctaggtgcttggttccctgtcagttatagatccgggagtctttagaacttcttctgagccttttaatccctccattctccagtctgaagctagacctcagaattgtctgattagagtcctggatcagtcttacctcatggaattggtttcactttttccctaggcttagttactgtcttcttttgtttgaacttgtcttttatactaaactagtatctagagtgagacagggattaggatgaatctctttttccaagtggagtgggtgagacagtttgacctaggagtttcttgtggccctaggtaatgtaacagaaactggactgttgttgtattaaattttgttagtattctaagagatttttttaacatatattcaaggaataccttgaaattagccctgttttttttttatttaatacaatttgcttttatagaattatactttgaaagttggtattcaagtaagattctgattgttctcatgtcatctttcatgacatgagtaaaccttttgaaacatgctgaaggcctagtgataggacattgggcaaattacagactatataggtattgaaatactatataaccattaaagctgggcatggtggctcacgcctgtaatcccagcactttgtgaggccaaggcgggcggatcacgaggtcaggagatcaagaccatcctggctaacacggtgaaaccctatctgtactaaaaatacaaaaaattagccaggtgtggtggcgggcgcctgtaaccccagctacttgggaggctgaggcaggagaatggcgtgaacccgggaggcagagcttgcagtgagccgagatcgtgccactgcactccagcctgggtgacaaagcgagactccatctcaaaaaaaaaaaaaaaaaaaaaaaaaaagaaagaaatactatataaccattaaaaatgttgcggaaacatttactgatataaaaaagtgcacattttctccgtggaagtcagttaaaagtagcatgtatattcaaattttatttaaaaaatacattaggaaaaagtgcttggtgcttggttatgcaacagtgttcatgtggttactggttgctggtgagattaggtcatttgatttttttctgtagtaagtgatattttgtttaatcactttatttatttgtttatttagagacggagtctcactctgttgcccagcctggagtgnnnnnnnnnnnnnnnnnnnnnnnnnnnnnnnnnnnnnnnnnnnnnnnnnnnnnnnnnnnnnnnnnnnnnnnnnnnnnnnnnnnnnnnnnnnnnnnnnnnnnnnnnnnnnnnnnnnnnnnnnnnnnnnnnnnnnnnnnnnnnnnnnnnnnnnnnnnnnnnnnnnnnnnnnnnnnnnnnnnnnnnnnnnnnnnnnnnnnnnnnnnnnnnnnnnnnnnnnnnnnnnnnnnnnnnnnnnnnnnnnnnnnnnnnnnnnnnnnnnnnnnnnnnnnnnnnnnnnnnnnnnnnnnnnnnnnnnnnnnnnnnnnnnnnnnnnnnnnnnnnnnnnnnnnnnnnnnnnnnnnnnnnnnnnnnnnnnnnnnnnnnnnnnnnnnnnnnnnnnnnnnnnnnnnnnnnnnnnnnnnnnnnnnnnnnnnnnnnnnnnnnnnnnnnnnnnnnnnnnnnnnnnnnnnnnnnnnnnnnnnnnnnnnnnnnnnnnnnnnnnnnnnnnnnnnnnnnnnnnnnnnnnnnnnnnnnnnnnnnnnnnnnnnnnnnnnnnnnnnnnnnnnnnnnnnnnnnnnnnnnnnnnnnnnnnnnnnnnnnnnnnnnnnnnnnnnnnnnnnnnnnnnnnnnnnnnnnnnnnnnnnnnnnnnnnnnnnnnnnnnnnnnnnnnnnnnnnnnnnnnnnnnnnnnnnnnnnnnnnnnnnnnnnnnnnnnnnnnnnnnnnnnnnnnnnnnnnnnnnnnnnnnnnnnnnnnnnnnnnnnnnnnnnnnnnnnnnnnnnnnnnnnnnnnnnnnnnnnnnnnnnnnnnnnnnnnnnnnnnnnnnnnnnnnnnnnnnnnnnnnnnnnnnnnnnnnnnnnnnnnnnnnnnnnnnnnnnnnnnnnnnnnnnnnnnnnnnnnnnnnnnnnnnnnnnnnnnnnnnnnnnnnnnnnnnnnnnnnnnnnnnnnnnnnnnnnnnnnnnnnnnnnnnnnnnnnnnnnnnnnnnnnnnnnnnnnnnnnnnnnnnnnnnnnnnnnnnnnnnnnnnnnnnnnnnnnnnnnnnnnnnnnnnnnnnnnnnnnnnnnnnnnnnnnnnnnnnnnnnnnnnnnnnnnnnnnnnnnnnnnnnnnnnnnnnnnnnnnnnnnnnnnnnnnnnnnnnnnnnnnnnnnnnnnnnnnnnnnnnnnnnnnnnnnnnnnnnnnnnnnnnnnnnnnnnnnnnnnnnnnnnnnnnnnnnnnnnnnnnnnnnnnnnnnnnnnnnnnnnnnnnnnnnnnnnnnnnnnnnnnnnnnnnnnnnnnnnnnnnnnnnnnnnnnnnnnnnnnnnnnnnnnnnnnnnnnnnnnnnnnnnnnnnnnnnnnnnnnnnnnnnnnnnnnnnnnnnnnnnnnnnnnnnnnnnnnnnnnnnnnnnnnnnnnnnnnnnnnnnnnnnnnnnnnnnnnnnnnnnnnnnnnnnnnnnnnnnnnnnnnnnnnnnnnnnnnnnnnnnnnnnnnnnnnnnnnnnnnnnnnnnnnnnnnnnnnnnnnnnnnnnnnnnnnnnnnnnnnnnnnnnnnnnnnnnnnnnnnnnnnnnnnnnnnnnnnnnnnnnnnnnnnnnnnnnnnnnnnnnnnnnnnnnnnnnnnnnnnnnnnnnnnnnnnnnnnnnnnnnnnnnnnnnnnnnnnnnnnnnnnnnnnnnnnnnnnnnnnnnnnnnnnnnnnnnnnnnnnnnnnnnnnnnnnnnnnnnnnnnnnnnnnnnnnnnnnnnnnnnnnnnnnnnnnnnnnnnnnnnnnnnnnnnnnnnnnnnnnnnnnnnnnnnnnnnnnnnnnnnnnnnnnnnnnnnnnnnnnnnnnnnnnnnnnnnnnnnnnnnnnnnnnnnnnnnnnnnnnnnnnnnnnnnnnnnnnnnnnnnnnnnnnnnnnnnnnnnnnnnnnnnnnnnnnnnnnnnnnnnnnnnnnnnnnnnnnnnnnnnnnnnnnnnnnnnnnnnnnnnnnnnnnnnnnnnnnnnnnnnnnnnnnnnnnnnnnnnnnnnnnnnnnnnnnnnnnnnnnnnnnnnnnnnnnnnnnnnnnnnnnnnnnnnnnnnnnnnnnnnnnnnnnnnnnnnnnnnnnnnnnnnnnnnnnnnnnnnnnnnnnnnnnnnnnnnnnnnnnnnnnnnnnnnnnnnnnnnnnnnnnnnnnnnnnnnnnnnnnnnnnnnnnnnnnnnnnnnnnnnnnnnnnnnnnnnnnnnnnnnnnnnnnnnnnnnnnnnnnnnnnnnnnnnnnnnnnnnnnnnnnnnnnnnnnnnnnnnnnnnnnnnnnnnnnnnnnnnnnnnnnnnnnnnnnnnnnnnnnnnnnnnnnnnnnnnnnnnnnnnnnnnnnnnnnnnnnnnnnnnnnnnnnnnnnnnnnnnnnnnnnnnnnnnnnnnnnnnnnnnnnnnnnnnnnnnnnnnnnnnnnnnnnnnnnnnnnnnnnnnnnnnnnnnnnnnnnnnnnnnnnnnnnnnnnnnnnnnnnnnnnnnnnnnnnnnnnnnnnnnnnnnnnnnnnnnnnnnnnnnnnnnnnnnnnnnnnnnnnnnnnnnnnnnnnnnnnnnnnnnnnnnnnnnnnnnnnnnnnnnnnnnnnnnnnnnnnnnnnnnnnnnnnnnnnnnnnnnnnnnnnnnnnnnnnnnnnnnnnnnnnnnnnnnnnnnnnnnnnnnnnnnnnnnnnnnnnnnnnnnnnnnnnnnnnnnnnnnnnnnnnnnnnnnnnnnnnnnnnnnnnnnnnnnnnnnnnnnnnnnnnnnnnnnnnnnnnnnnnnnnnnnnnnnnnnnnnnnnnnnnnnnnnnnnnnnnnnnnnnnnnnnnnnnnnnnnnnnnnnnnnnnnnnnnnnnnnnnnnnnnnnnnnnnnnnnnnnnnnnnnnnnnnnnnnnnnnnnnnnnnnnnnnnnnnnnnnnnnnnnnnnnnnnnnnnnnnnnnnnnnnnnnnnnnnnnnnnnnnnnnnnnnnnnnnnnnnnnnnnnnnnnnnnnnnnnnnnnnnnnnnnnnnnnnnnnnnnnnnnnnnnnnnnnnnnnnnnnnnnnnnnnnnnnnnnnnnnnnnnnnnnnnnnnnnnnnnnnnnnnnnnnnnnnnnnnnnnnnnnnnnnnnnnnnnnnnnnnnnnnnnnnnnnnnnnnnnnnnnnnnnnnnnnnnnnnnnnnnnnnnnnnnnnnnnnnnnnnnnnnnnnnnnnnnnnnnnnnnnnnnnnnnnnnnnnnnnnnnnnnnnnnnnnnnnnnnnnnnnnnnnnnnnnnnnnnnnnnnnnnnnnnnnnnnnnnnnnnnnnnnnnnnnnnnnnnnnnnnnnnnnnnnnnnnnnnnnnnnnnnnnnnnnnnnnnnnnnnnnnnnnnnnnnnnnnnnnnnnnnnnnnnnnnnnnnnnnnnnnnnnnnnnnnnnnnnnnnnnnnnnnnnnnnnnnnnnnnnnnnnnnnnnnnnnnnnnnnnnnnnnnnnnnnnnnnnnnnnnnnnnnnnnnnnnnnnnnnnnnnnnnnnnnnnnnnnnnnnnnnnnnnnnnnnnnnnnnnnnnnnnnnnnnnnnnnnnnnnnnnnnnnnnnnnnnnnnnnnnnnnnnnnnnnnnnnnnnnncaaaacagtgcatgtgttttataaataatacaaattatatagatttatttatttatttattgagatggagtcttgctctgtctccaggctggagtgcagtggcacgatcttggctcactgcaacctccgcctcccgggttcaagagattcttctgcctcagcctcctgagtagctgggattacaggtgtctgccaccatgcctggctagttttttgtatttttagtagaaatggggtttcagtatgttggccaggctggtcttgaactcctgacctcgtgatctgcccgcctcagcctcccaaagtgctggggttataagcgggagccactgacccgcccaaatcctgaaatttctgaaacaactatatctttaggtaacttactagcttttgaagagttcaggtttgccttttattacaattattgcattgatactagtagtattttatagactttcttgtgtgaaatgaaaagctccttgtgactattaatttttcttattccagttattgaattgctattgtcaccatataatatgtaattttatttatttatttatttttgagatggagttttgctcttgttgtccaggcgggagtgcaatggcatgatcttggctcactgcaacctccacctcctgggttcaagtggttctccttcctcagcttccctagtagctgggattacaggtggccaccaccatgcccggttaatttttttgtattttttagtagagactggccatgttgctaggctggtcttgaactcctgacctcagctgattcacctgctttggcctcccaaagtgctgggattacaggtgtgagccaccccgcccagccaattttaatattttttaaatataaaattgcctttctgatttgtatgtcattagttattgaaattaactgttaatagccatatgtttgcccttcatttactgtactttaaagtttttgagacagggtcttgctgtattgcccaggcaggaattcagtggtgtagccatggctcacctcagctttcagcttcaacctcatgggctcaagcgattttcctgcctcagcctcccaattagctaggactacaggtgcacacccctatgcctggctaattaaaaacatttttttgtagagactgggtctcactatgttgctcagactggtctgcgattcctgggctcaagtaatcctccaacctctactcctcaattttttttagttttggagacagggtcttgctgtgtttcccaggctggagtgtagtggcacaatcttggctcactacagcctcgaactcctgggctgagttgatcctcctgcctcagctttttgtgtagctaggactacagtcctgtgcccaccacaatcagctaattaaaaaagaaatttaaaaatgttttttgtagagatgaggtcttgctgtgttgcccaggctggtctcaaacatttggcctcaatgatcctcctgtggtggcctcccaaagcactgggattgcagatatgagccactacacccagcccatttactgtaatttttagcctttgagaattttgtgatattggctagattttgccatagagatttgtaagtaaccaaattttattcctaacattgactactagataactgaatggttttggtgagactttaccattcacacttgaatatttatgttttctttaagggaaatcacaatgtatataagtttttaattttgtttcaaatgaattccatttgataaaacacgtagcatagctaggtggggtgactcaaaccagtaatcccactgagtcaggggcctgagtgggagtatcctttgaggctacgtgtttgagaccagcctgggaaacatagtgagaacctgtctcttaacaaaaaaaaaggcataaaataaactggacacttttaagaggtatgttggtccggatcattggttttagaagatagagcaaaacttgagagttaaaccctagggttttttttgtttgtttgttttgttttgttttttagctctgattctactagaagtagtcatgtcatctttggcaattctcttaatgtaacattttggaacttggtttccttgtctatatgagagagttgatgataccttacaagttgtactgaggattacatgagccctccatgcaaaatactaaatacactgatacagatatggttggtactcaagaaataatggcatatttttttttttcttgctatgttgcccaggctggtctcttaactcctggcctcaagcagtcctcccaccttggcttcccaaagtgctagaattacaggcatgagccaccatgcctggccaagaaacaatgctgttattactctagctagcagaaaacaaaaatcattttctggagaattagactatttaacaaggcacatgcttatcagtacgtgcgttacctcttctagtgttctgctgtgttgatattagtgaccaagatctgcatagtttgagaaccctctatttcaaggattaggaggtagaaagcttatgagaaagaaatctggcctggtaaaatgcaccttcgtgggctttttgaaagatgggactcattctttgtctttcagtggtttattataatctattaaaatttactttatgacctgagacaaagccattttactatttaggctcagtttaacattgttaaacctgtctactattcagagtgtaccaaggtgcttttatttcttaagagttctgttgtatttcatccataaaaatgattgaagcagggtcaggaaccagtggctcatgcctgtaagtctagcactttgggaggccaaggtggaaggattgcttgaggccaggagtttgagaccagcctaggcaacacagcgagaccccatctctacgaaaaaaaaaaaaaagatgggtgtgctgctgtagtgttagtttatagtcctagctgctcaaagagctgaggtgggaggctccctcaaggggatccctcaagattgaggctagaatgagttatgattgtgccagcgcactttagcctgcacaacagtgagactctgtctccaaaataaataaataaatagattgaagcagataactgataactgttattgttatgggagggatgttatctcccaaagattacccatagatacttggaattaatttttggagctctatttggactatcagagctctcttaaaacatgacattgcttgcaccaaaaaaatagaagccaagggggcaaaaaacatgaaattgcttcatttagttatttgctttcttaaaaaatattttgggtctggcatagtgtctcatgcctatgaaccttgagaccaggagttggaaaccagccagggcaacttagggagacctcatttcttttataaataagttttttctttttttggagacagagtcatgctctgtcacccaggctggagtgcggtggcatgatcttgacttatggcagcctccacctcctgggttcaagtgattctggtgcctcagcctcctgcgtagctgggactacaggcacatgccaccacacccaggtaatttaaaaaatatttttagtagagatggggttttgccatgttggccagcctggtcccaaactcctggcctcaagtgatttgcccacctcggcctcccaaagtgtataaataaaaatttttgaaaaatattttgtatgtttaataatttgttcattataatgaaatttattttgtgctacagaagaaataaatgtatcttactgtacattatagacataacgttagtaaatggaattccctgtagttgcacacctccttggttaactgtttgaagtctttctccagactttctatgcccattacagcattttaaattttaactaaaatgttgtatactgttttatagtattctttcttagttatccttttatagttttctttcttttccttttcccctttcctttcctttccttctctttctccttcttctccttcttcctttcctttgctctcctttctctttctttctttgtctctctttctctctcccctcccctcctctcctttatttttttcctttctttcttgacgaattctcactttgtcgcccaggcttgagtacagtggcgcaatatcggctcactgcaacctctgcctcccaggttcaagttattctccagcctcaacctccctagtagctgggattacaggcacccaccaccacacctagctaatttttgtatttttagtagagacagggtttcatcatgttggtcaggctggtcttgaactcctaacctcaagtgatctgcctgtctcggcctcccagagtgctgggattacaggcatgagccaccacatttggcctattttttctttttaatgtaatttctttagtaacagttttatgtttcagtaatagatatctatttccattttttggaaatgactagaattacttatggatgctgcttaatttatttttatgcaattctttctaatctacttgagttatttctgtttttcttatattatgaaccatgctgcactcaacatttttatacagcttcttttacttgaatggatatttttggggataaattatagaagcagatcaaaatgtatgaagggaagtatgtcagagtatgaagtgggtaaaaaggttgtggaaattaagtgttagctattatgagttttaaatggtttggttcctgattccatttagatctttattgtttttcttcatttttgtttgtatttactttgtattattttgctttgttgcatgtattctagttagccacttaaaaaaaatttaatttttggggagctagggtctcactctgtcacttaggctggagtacggttgtacgatctcaactcactgcaacttccaccatccaggctcaagcgatcctcctacctcagcctcctgagtagctgggactgcaggcacatggtgcaccacactggctaatttttgtattttttttttttgtagagtgggggtttcatcatgttgcccaggctggtctcaaactcctgggctcaagcagtccacccaccgcaacctcccaaaatgctgggattacaggcatgagccattatgcctgaccattagccacttttagattcctaatacatgttttttccctgaggtgaggtctaactgtgttgcctaggctggccttaaatgcctggactcaagtgatcctcccacctcagcctcctgagtagctttatgtttcagtaatacatatctatctccatttttttggaaatgactgagattataggcacatgccagtgtgccacgctaaattctctttataacaaaattagggaaatattatcttgaatctttgggtggtactgattagcattttgtttttttttttggagacagggtcttgctctgttgcacaggttggatggagcgtggtggcataatcacagctcactgcagcgtcgatttcccaggctcaagcgattcttccccttcaacctctctagtagctgggactacaggcccacactaccacggctgactaagttataaaaatttttggtagagtcagggtctcactatgttgtccaggctagtcttgaactcctaggttcaaacgatcttcctgtcttggcttcccaaagtgttgggataacaggcatgagccactgtttctggcctaattagaaaattttaaaaacatttttctattccctgcaccatttctctcctacagggttggatctgttttttgtcttgtttcttcactttcttaatgtaaaatagaaaacatactgtagtgttgtaatcactaagtaagcaggatcttgttttttttttttttttctcttggtaggaaaaaaatacaaaagttcttttgaaataaaaatctttctcacactttttttttttacatagaactacacatacacacacacacacacacacacacacacaaagaaaaaatatttttctcaaatagaaatggtaatgttcaattcaaacacacatgctatcccacagcatttcttcttcattcagtgtgttgtagattcttctgtaacatggcacagaaagagaaacagtttggtgagtggttaagagccccagttggagttggttgacacctcttcgtttatgtagtatgaccttgggcagactgcattgctgctgtgcactggggttttctattttgaaatatgggaattataattgttcctaggatttttttgagggttaacattaacttgtgaagttcttagaacagttggttcaagatatttagctgaataaatataaactgtaatgtaatgattataatataattttctcatttaaaaaatatatatgttacggatttatcacattcattaagtcattctcaaattgatgtgcagaaaactttattttagaacacgttatttttcccttagatgttttcaaagtgatggtttttattttagtaactggtaacaagtcttattttgctcttagttccttcagtgaagaacgtaattgaagcttcaaagtgtttataaaatagggaagtaattaactgcttttcattcctaaccctggatatgtctgcttttctcaggttctattttgtatagtttttacaatatagtcttgttttcaaatagtagtcttcacatcagccattgctgaaaactgcttactttaattttatctttttataacctgctgcataaataattttgccaaggccaggtgtggtggctcacgcctataatcccagcactttgggaggccaaggcaggcggatcaaatgaggccagttcaagaccagtctgggcatatggtgaaaccccatctctaataaaaatacagaaattagccatgcatggtggtgcattcctgtagtcccagctatttagggggctgaggcgggaggcccacttgaacccaggaggctgaggttgctgtgagctgagatcacgctactgcactccagcctgggcagtagagcaagactctgtctcaaaaaagaaaaaaaaaatttgcccatgctactgggaccttcaattttagtgaaaggaagaacattttattgttcctattctgttttttctgtaggttattgccttctttgcaattggaaaatcagtttcatgatgattttgttattgtgttggttatccacaaatgtctagagaatactgtattttcctgagaaagacacattatgacatactgttacagagagaagacagcctcaaccaaatctggagaaggtttttaagaatgtgggaaatgcttgctaactttttaaatcactgagcaaagttagttaatattttcattagacttgggtgacccaagtaaggaatcctttacatttttttctaatggaagaaaatactgtcttaatcaggataattctagggatggggtaaggctaggatagttgtactcagtgctagctgttggaatcagttttgtagtttaaattatatagaccagtgtgggcctgtagtcctagctactcgggaggctgaagcaggagtttggcttgaggccaggtgttcagggctgtcttttgtgatgatcgtggctgtaaatagccactgcactctaagttggcaacatagtgaaacccatcttaaaaaaaattaaatagatctgaatcagattttgcagctttagttttagatataccatatagttaagacccctagcttaagagaattaggatgctcagtagtgagttcatttaggtcttgcatataatataaaggatattaacttggtttttgccttgttatttgcacaatacctttttcgaaagctttgagttaccagcatgatgctgattgttggatttagagcctattgtttaagttttttttgtttttttccgagacagggtctcactcggtcacccaggctggagtgcagtggtgagattgtagcttactgctgcctcaaactcgtggcctcaagcgattctcctgcctcagcctcccaatgttctgggattacaggtgtgagccaccacacccagccttcttgttaagatttttggcttgtcatgatccagaaataagttgattatttctcaatggatatattcttttagtttcttttctagagtaatagtataaacagggtttggcaaatgagtagaggaagatgttttttccctttgaagtggatttgttttgggacctgataaagtgcaaaccaagcatgttgtacttgacatcttcttggaacttggaatatttcattaccagttatctaattggtcaaagttagaaactaagttgggcatggtagctcatgcctgtaatcccagcattttgggaggccaaggcaggaggattgcttgagcccaggaggtcaaggctgcagtgagctgtgatcacactgctgcattctagcctgggtggcagggtgagactttgtctgaaaaaacaaagcaaaaaaacccaaattaatgggcaatgatagtatttagctattttttttccatgaggaagtgattttttttctttatttttttgaaacagtcttgctctgttgcctaggctggagtacagtggtgcaatctcggctcactgcaacctgggcctcccaggttcaagcgattctcctgcctcagccacctgagtagctgggattacaggcgtgtgccatcatgcctggctatatttttagtagagacggggtttggccatgttgaccaggctggccttgcgctactgacctgaagtgatctacctgcctcagtctcccagggtgtgggattatgggtgtgagccactgtgccccacaggacatcttgatattaattaagatcattcatatttcctttggtttggtctgtgctgaaccttctgacatgtacaacctccttggtttagggaaggagggcttaggaattctctcttttttgtttggagtgaacttgtgcattttttactctgttccacatttttcttcaggtcactcttgagggacttgggtcattgtgattcatgtacctattgagttaattttcgtgacttctttctagacagtgaagagccagagctctgacttttagcttcggggactgattctataaatatggatggacaggtcatttaaatggattgcattaatacagttaatggcgtttccaggatgttttgaaattttcccctctgtgtttcttatgcaaagagcttacgtttgatgttgtggtctgactttgatgaactgtgttacctgggctatttctagtgtaattcagtgcaaaaggaggaggaacagttttactccatatcagttaattcagaaaagtagagttgtggttttaatttgttgggttaatgagtgtcattgtcacaccatgaatgtgcccaaggtagttaggattctgagagcgtaggtcttttctttgtttgctttttaaaaatattacatttagatttagttatggattactttagttaattatttttgaagtttcaatctgggattcacatttaacaatctttttttttttttttttgagacagggtcttctgttgcttaggctggagtgcagtggcccattgtagctcactgcagccttgaccaccaggctcaagtgatcctcccacttcagcttcctgagtagctgggagtacaagtgtgtaccaccatgcctggctattattgttattattattttttaattttgtaaagataaggtcttactatgttgcccaggctggtctcaaactccaaggctcaagtgatcctcctgcctctaactcccaaagtgttgggattacaggcatgagccaccatgcctagccagctatactttgttgaatacttctgaggtgcattatgtatatattttaatttttttcatagatgatggtgtccagtatataatttgagaccaggtgcagtgtctaatgcctgtaatccaacaatttggaggctgaggcgggatcgcttgaagccagagtttgagaccagcctgagcagtgtagtgagacctcgtctctacaaaaatttaaaattaattagccaagtgtggtggtgcacacctgtagccccaggtagtcatcaggctgaggcaggaggatcactttagcccaggagttcaaagttgcagtgaactatgattgtgccactgcagtctagcctgagcaacagagtgagacctagtctccaaaaaaaaaaaaaggaaaaacaaacaaacaaaagcaaagtaatatcatatgagccacccatgtaattttagattttctagtagctacattaaaaagtaaaaagaaacaggaaaaatcaattttaataatatttgactcaatatataaaaatattattaagacatcatataaaaattattagtgagatactgtattttacattctttgtactaagcctttgcacttcagtgtatgttttacacttacagtaacagcacaccttgtcttgcactagccagatttcaagacttcaatagcccagcgttcctggaggctacctattgaacagtgcagttctgtaatatattcaagtgtaaatactgttttctgtctgctttcagaaagaatcagaacgagcagatttgaggtgcaagggaaaggatgaagaggcagagctatatgacaggcaatacctatcagtattgtgatggttcataccatttccttcctgggttagttactctactaacaagtgtgggtaactttgtccaggcatttgggcactgtattgtgattttattatttatcagtttttcccattaaaccatgtagttaaggcaagggagtatggttttttgtttgtttgtttttgttttttttttgatacggagtctcgctctgccacccaggctggagtgcaatggtgcgatctcggctcactgcaacctccgcctcccaggttaaagcaattctcctgcctcagcctccagagtagctgggattacaggcatccaccaccatgcctggctaatttttgtgtttttagtagagatggggtttcaccatgttggtcaggttggccttgaactactgacctcatgatccacctgcctcggcctcccaaagtgctgggattacaggcgtgagccaccatgcccagcctgttctttttttttccctttggcaagggagtgtgttcttttttttttgagacggagtctcgctctgtcgcccaggccggactgcggactgcagtagcgcaatctcggctcactgcaagctccgcttcccgggttcacgccattctcctgtctcagcctcccgagtagctgggactacaggcgcccgccaccgtgcccggctaattttttgtatttttagtagagacggggtttcaccttgttagccaggatggtctcgatctcctgacctcatgatccacccgcctcggcctcccaaagtgctgggattacaggcgtgagccaccgcgcccggcctgtgttctttgtttctgctttcataagggtctgtctatgctagtaataaagtagatgctatacttattattagaagtctttctgttgataacagggagctctggcatgattgattatatgtctgggacccgggtgtgttacattacccatattagttatacatgaattcattcccaggcttattctacaaattgggagttggaaaatgtgtacaccatcagtagtaagaccacatgtgaggactctagtgttattaaatactgacacatggtcttgtatttttgcatctttataggttagcttttgccagtagtaataactaacatttgatgaaaatattctgtgtggactattcattttttaccccatttaattttctttgtttttatttttagtttttgagacggagtttcgctcttgttgcccaggctggagtgcaatgccacgatctcggttcattgcaacctctgcctcccaggttcaagtgattctcctgcctcagcctctcccgagtagctggcatcacaggcatgcgccaccacagccagctaattttgtatttttagtagagacgggatttcaccatgttggccaggctggtctcgaatttctgacctcaggtgatccacccgccttggtctcccgaagtgctgggattacaggcgtgagccaccatgcctggcctaccctgtttaattttcacaattctgttgtgactctgcgggtggtgttgacctcattgtatagataatgaaaatgggttttaaatatcttctgttacaaaaggcatttgcatctcatgaatggaatttgtgtgtaaatttagtgtatgtggtgggacgtatttcttttcttagaatctataatagtaacatgatgatgatgatgtattacgtgaaatttatgtttgtgttttaggcagatgtaaagtggcacatctggtttgaaaacctaaaacaattgtattttaaaatattgcatatatatctgagattggtaactgttagagaataaaacaaaaaaaaaacactgcatagtactatataaaaatacactataacatagcaaagcaatgcattcatcagctggcttcacaaacaaaatgtaactaaagtctcttgcatgtaccctccttgatcacttgctcctctctttcaccagagataagtggtatcctgaatttgggattcattagcccaatgtatttctgttatttttatttttgttttttttgagatggagtctcactcggtcgtccaggctggagtgcagtggtgcgatctcagctcactgcaacctccgcctcccgggctcaagtgattctcatgaatcagcgcccgagtagctgggactacaagtgtgcaccaccatgtctgactaatttttgtagttttagtagagatgggggtttcaccatgttggctaggctggtcttaaactcctaacctcatgtgatcctcctgccttggccctccaaagtgttgggattataggtgtgagccaccacacctggccagcccagtgtatttctatatttactatatatgtatagctgagttttctaggtgtctttttatttcagctgaagaagaaattggaattattaaatctcaattttgacatgtgtatattttttcagcctgtaagatattttctgaacttagctccaacattgtatttctggagagttattaagtctcattatgactgagatacaggaatgtgaggtttgaaagagctaatcttagtattaatacccaatattttgagctgttaagattttaatcttataaagggcaggaataagactgtttaaaattattttgctcagtgaagtaaaattctaatgtgagattttattaaatagggtctgctttactatatttaggcgtaagcatagaagcagcaagtgacattgaaatccatggtgtaaatctccgcagtaagtacagttcaacgactgagaacattgtgatgatggtgacctttaagcatctgaattctgatgatacttatttatctataaatgagaatgacaatacttagattattaggataatggggaggactaggggaggactagagtatataaagtgcccggaatcatcctgggtgctgtcttagtgtatcagatatatttcaaaccttagtatttgtggcctttgaatttaaacagttgctgttattagcttcaattgttagagatagtgtcaatgagtggaatatgtcagctagaagctactccttttagattttccacattctgaaaggtaggactatgtttcctttttgatagttgcatcttcactctcctatagggagccagtgggactccaaaccaatagcatagacaacagtcattaagaaagaaggcttaggctgggcgcggtggctcatgcctgtaatcccagcactttgggaggccggggtgggcggatcacgaggtcaggagtttgagaccagcctggccaatatggtgaaaccctgtctttactaaaaaaatacaaaaattagccgggcgtggtggcacacgcctgtagtcccagctactccggaggctgaggcagtagaattgctggaacctgggaggcagaggttgcagtgagctgagatcgtgtcattgcactccagcctgggtgacacagcgagactccgtctcaaaaaaaaaagaaagaaggctttggaaggctttgtgcttgaacccagccctatctgtgaagtgtaatattatttaaatctgctacattgtcatttttgtttaataggatatttttccatttgaaacaaatgtagtaaatgttcataatgaaaaatttggggccgggcatgattgctcacacctataatcccagcacttggggaggccgaggtgggtggatcgcttgagcccaggagttcaagactagcctggacaacatggtgaaatccccatctctactaaaaatacaaaaattagctgggcgtggtggtgcacacctgtaattttagatactcgggaggctgaggcaggagaatctcttgaacctgggaggcggaagttgcagtgagccaagatcatgccactgtactccagactgggtgacagagcaagaccctgtctccaaaagataaaataaaaatttttttaaaaaaggaaaatttggaagttttaaaagctatgaaagctgggcatggtagctcatgcctgtgcttctagcattttgggaggctgagatgagaggattgcttgagcccaggagtttgacaccagcctacacaacatagtgacaccccatctctacaaaaaaataaaaaatatgcttggtgtggtggcatatgcctgtggtcctagctataatacttgggaggctgaggtgggaggatcagttgagcccaagaaatccaggctctggtgagcaccactgcactctagcctgggtgacagagcaagactctgtttcaaaaacaaataaaagctatgaagagacaaaccctaatttcactattcagaaagaaccttttctttttttaattcagcattttttcctaggcttatttaattttctttttgttgctttaattaaagcaacaaaatgctcctccagagcattccaagctatagatggacaagcagtatctgaattaacagggaggatttttttagaatggtgtttagaaaatgataaatttttatttgaatgttaaggaaaatgtttgaatctctcagtttttaaacctcatttcaaggacaaatatcactttggctatgtttattgagttttgaataaaaatatctaacaatatgtttactttgatacggagaacattatttatattaatgatattgatctttctattgccttcatttttgaaaaatatttttcctcatataaaattctgtgttgacaagtatttttctttctttttttgattattaaaaaaattttttttttgagacagtgtctcactgtttcccaggctggagtgcagtagtatgatcatggcttactacagccttgacctcctaggctcaggtgatcctcccacctcagcctcccaagtagcttggactacaggcacacatgaccacacctggcaacgttttctgtttcttgtagagatgggttttgccatgttggctaggctagtctcaaacttctcggctcaagctatcctccagccaaaagtgctgggattacaggtgtgagccaccatgcccagccacactcttttaaagtagtgcaaatgtcattgttttctgactcgtattgcttctcacaaggtctgctgtaattcttacctgtttacttaagtatatgtaattttttgttttcttcttcttgctgccttcatgctgtttgattttgatgtttccaggcttgtgtgtttgttggtttgttttatatttaccttgcttaggatttctctaaacttcttggatctgtggtttggaatttttttttttttttttctggaaaattctaggtcattatctcaagtatttcttttttttagtctcttttttcttctgtgaatccagttatacatatattataccatttgatactttcccacattagtggaacctcttttttttttttcttccctatgttgtagtttgagtaatttctgttgatacatcttaatgtatctttaagttcgttgattttttttttttttttgaggcagaatctcactctgttgcccaggctggagtgtagtggcatgatcttgactcactgcaatctccatctcctgggttcaagtgattcttgtgactcagcctcctgagtagctgggattacaggcgcgcaccagcatgcctggctagtttttgtatttttagtagaaatggggttttgccatgttggccagcctggtcttgaactcctgatctcaggtgatccacccaccttgacctcccaaatcccaaagtgctgggattataggtatgagccaccgtgcctggcccaagttcgttgattctttcatcaattgggcccagtctgctgacattgtattttttatttctagcatttgcatttagcttttgaaattattttccatctaaaaataatttttcttcctgaaattacccatctattcatgtatgttgtctcctttttcactgtcctttaacatactaatcattattacagagaaatcactgtcttcatttttctagcttctgtatcatccctgaatctggttgtatttattgcttttttctcttcactaannnnnnnnnnnnnnnnnnnngacgagggcgggggggggcgccttatggctggcggtaacagcggaatcgttgttgcgggggaatgacggtcgtgattttcggaggtgcggtagcagcccgggagccggtgtaattattgcttttggccgtgcactaaaggggttttttcatagggtggtgctcctaagttttgagtaagcgttgaacattgtatggaagaacagtagagactgagataagtagcatttatgtttggaaatggcacgccacttcttccttcaggcctttaccgtgagatattgggtgcttagttaagctagctactcacgcctgtaatcccagcattttgggaggctgaggcaggtggatcacttgaggtcaggagttcaagaccaccctggccaacatggcaaaaccccatctcaactaaaaaaacacaaaaaaattagctgagtgtggtggtgggcacctttaatcccaaccactcgggagactgaggcaggagaattgcttgaaccccgggggcagaggttgcagtgagccaagattgccccactgcaccctagcctgggcgacagagcgagactttgtctcaaaaaaaaaaaaaaaaaaaaaaaaaaagagatggggtctcctgtgttgcccagtctggtcttcaactcttgggctcatgtgatcctcccgccttgtcctcccaaagtgctggaatcacagccactgcacttggctctagcttgggtttttattgttgttgtcattacctttggtgtaccacaggctttagagtcttaaaatggtagctaatttacccacagtgtagaataccgttgcttggtactaggtgctaggattgtgctaggggctattatcctgatccaccctcatctcagccttatgcggacctggtgtatctggcctcatagatgtggctttgtcagtgttacctcccctcttccatgtagcagccagtttgtcttatatttgtggtagttctcgggttggaatttctcaccccttgcccttgccaatggtagcaaacttctgcttgatggatcagtgtgggatcctaggcccaaaatggtttccatattcttcctcactggaattggggtggggggttgttacttcttcatcctggcaacggtagattttggaaatgtcctgggggagaaaagggtttgctgctttctctacagggacctctgcttcatagcagaaaaggacctgtggaatctcttcaggctttgtgcctgttcctagctgtggaggatctacctcttgcactcctgttccatcagatgggactctctccagtttctgtcatgaagccagtctttcttatgagcaactgtgagagatgtgtaaaggtcttgctcatgtggagatttgtagtgaagaacttgcaagtgaatgtcatacttaccaagtgcattgtgtctgggcattcacttcggaaactgatatgccagtccacacttaactttgaggaatttattaaacttttagcagtttttttttttttgagatagagtttcgctcttgttgcccaggctggagtgcagtggtgcaatctaggcttaccgcaacctctgcctcccaggttcaagtgattctcttgcctcagtctctggagtagctgggattacaggcacccgccaccacgcctggctaatttttttgtatttttagtagagatggggtttcaccatgttggccaggctggtcttgaacgcctgactttgtgatccacccgcctcggcctcccaaaattgtgggattacaggcatgagctaccccgcccggccagattttttgtattacaaccgaccatctctttctctcatggtctgtcctttggaattcagttcattttgttttcttgcaagttcagctccctaatgggctaaagaaaagttacgttttatattatgtggccttttctccttttaaagtgagtgtgatattctctgcagctttctttttcctaagcagaaacagaaatctaatagtaatctttcagattaatctgtgtcaaatttcactgcaagaaacattcaaagttgtaatcattccaagaaggattacaaaaatacttgaaataccaggtgaaaaaactagatttaggaaatcaaggcattgagaaaatattaataagaatagagattaaaaaataactcgagctaggtagagccatgagcattatacagaaatgaaggccaaagaacctggataattgctggatgtgggttggagttatgaatctgagcttcataatgaccaaagcaaagttatataattgacaatgttgaaacttttttttttgtttttgagatggagttttgctcttgtcacccaggctggagtgcgtggcgtatcttggctcactgcaacctccacctcccaggttccagcgattctgctgcctcagcctcctgtgtagctgggattacaggcacccgccactacacctggctaattcttgtattattttttagagacggggtttcaccatgtttgccaggctggtctcaaactcctgatctcaggtgatctgcctgcctcggcctcccaaactgctgggattataggagtgagccaccacacccagccgaaactttttttttttttttgagacggagtcttgctctgtcgcccaggctggagtgcagtggctcgatcttggctcactgcaagctccacctcccaggttcacaccattctcctgcctcagcctcccgagtagctgggactacaggcgcccgccaccacgcccggctaattttttgtattttttttattagagatggggtttcaccgtgttagccaggatggtctcgatctcctgacctcgtgatctgcctgcctcagcttcccaaagtgctgggattacaggcatgagccaccgtgccctgcccactgaaacttttaatttatttccatgagtggattttaactaggaagaaatattttttgctttactggcagatctagtggagtgaattgtgcaatttataagacatctatctttaacatagatactgtttttcttgtgttacattttaaagtgtattgtctgtacttttctcatattttgtgctgggggagctgagataatttcttgaatattagtgccttgtagtacaatgtaagatgctagttataagatagttgttgtttgaatcccagagtcctcaaaacaatcttttattgctaggaagccagaatggccttatgcacaggtagggttaaggaatgcattcatttgttcctttattcaacaaacattaattgcatgtctgctgcgtaccaggtattgcattaagagctgaggatatagcaatgaataaaaacaagtcattttttcacaaaatttatattgtattcagatagaaaggtagtacccagacataattgtcagatggtgataagtgctgtgtagaaaaaataatgcaggccagatgcggtggcccatgcctgtaatcccaacactttgggaggctgaggcaggtggattgcttgagctcagtataattttgagtcctgaaaaaaaatttaaaggaggccaggcatggtagatcacgcctgtaatcccagcactttggggaggattggtgcagcccatggctttgagaacagcttgagcaacatagtgagaccccatatttacagaaaatataaaattagccgggtgtgaggagcttgcctgtagtcccagctactgggtggggtagggcgctgaagtgggaggattgcttgagcctgagaggtcgaagctgtggcgagccatcattttgccactgcactctggcctggcaacaaagtgagaccttttctcaacaacaacaacaaaaacaccaacaataaaaattatagaaataaaaaaatacagtataataactctttatacaacatttacattgtataaataatctagagatgatttgaagtatgcagggaggatatgcataggttatatgcaaatactagatcatttatatcagggaattgagcatctttggattttagtatccacaggactcctggaaccaatctcctgtggatacagagggacaactgtacttcatcaattgacctagatccatctctattaatgtgttctctgatacttgatgcctttatttcccttatcttttttataattgttagtttttttttttaaagggtctgattctgtggtagcccaggttggaggaatgcagtggcatggtcatagatcactgtaacctgaaactcctgggatcaagggatcctcccatgccattctcgggagtagctgtgactacaggcaggtgctaccctgcctagctgtttactttttgtagagatggcggcttgctgtgttgcccaggctgatcttgaactactggcctcaagcaacctacctcggcctcccaaagtaatgggaatgtttccctcgacttgacatgtttgtttaagtctcttaagcttaagaatcaatactttatataaactcaatgtagtattgtggttaagagtatggactctggcctcagaatacataggttcaaatcttagtcttgggtaagtttttgccttttctgtgccagcttttttttttttttaaattttaatttttatatacattcttgagacagggtctcaatctgtcacccaggttggagtgtagtggcatgattatggctcgctgtagcctcgacttcctgggctcaagcaatcctcctgccttagcctcctgtgtagctgggactacaggtatgtgccaccaccacgcctgcctaatttttgtaattgttgtagagacacggttttgccatgttgcccaggctggtctcaaactcctggactcaagtgatcctccctccttggcctcccaaagtgctgggattataggcgtgaggcactgtgcctgttctgtgcctgttttttcatcctgaaataggaataagtaatagaacattcctcctaagtttgttgtaaatgaattaatgtgcatagaacagggtctgtcatacttagtgcctaatagtgtgtgtgtgtgtgtgtgtgtgtgtgtgtatatatatataaaaaaattatatatatttatttatatatatttatttattttcgatacagagtcttgctctattgcccaggctggagtgcaatggcacaatctcggctcactgcagcctctgcctcccaggctcaagcgattctcctgtcttagcctcccaagtagctgggattacaggcacccgccaccatgcctggctaatttttatatttttattagagacagggtttcaccgtgttggccaggctggtctcgaactcctgacctcaggtgatctgcctgccttggtctcccaaagtgctgagattataggcgtgagccactgctcctggcctattgcctaataatattagctattattattgtatggaatatataaccctggaacttctcttttaggggctgttgtcattaagaaagtgagggtactgtttcaaatgtttaaatagagtttaaacattgtttctgagacttccctattttcgtttcccagtaactttatcagaagttgaatatcatttagaattctctcatctttttaaaagcttttctttatatctcatatgctgcatacgtagaacccagatttggtcttttttacacactaacattgtactggatacaaagttattgagaaatcagcagctttaagtgggtatgtaattaaaataaatttcttcccttcaaatttataccattgtggtagctgatactgcctgtttacattttttggtaatgtgagggctgagtcacttttgatgaggaattgtggaacttatttctaaacctggatgtgttgaaacagttaattgaactggaggtgattttagatctccttggtattaaagagggataatcagcactgtggtaacagaaaattatgatggaaatattaattcccctttttgattaataattgagtaaatttttccttagtatttgctttcacaaaaatgaagttctttaacttgactggtttaaaatggttattctcaatcttcttgaaaaaattgtattatttaactgtttaggtatgtactttgttggctgaccaaaataaatgccatttttatgcttcctttaagaaggattgcacagaaaaattaaaaaaccagcacattgggataccaaacactactaggtgggatagtttgagatttcaaaattctgaagaattctcatttcctctaccttatagtcccatgaaggcttctgactattcccagaagtcagtctggccgtcttcttgtttatgtgtcagtgagttatcctcttatagaagcaaaataaagcctaccctttagatttccataataaagtatcagctttgctggctcttcaaggtgtttgaagccagtagtgcccatgtaagaagcaatctcacatctttactgctttactgttggacagtggtttgaatgtgtgccagatgaaggacatttcttgaaagctttgtactacaccttgaattttttttttttctttgagaccgagtctcgctcttgtcacccaggctggagtgcagtagtgcaaccttggcttactgcctccgcctcctgggttcaagcacttctgcctctgcctcccaagtagctcggattacaggcgcccacgaccacagctggctaatttttgtatttttagtagagatggggtttcatcatgttggctaggctggtctggaactcctgacctcaggtgatccacctgcctcggcctcccaaagtgctgggattacaggcgtgagccaccatgcctggcctacaccttgaatttgaggaagagatacgtaacgtttaagatatttgaagaatatcttaaacacagtatcatgtgtttccaactcctaaattgatccctagatagaccatcagaaggctgtgtgtaccatagcaattctgtctcttagaaatgccttccatctaaagcctgctctttgtcaacactggaattacagcactggataaggtttgtgtattttttataggacctatgtggcagaattttacttaatcataatctaggaaggaactctgcagataagtttgttttctgtggtttaaaaagttatccactacaatttgtcttttcctgccactcacttccctttttattttaaccttaatgccagtaaattttaagacaagtttttggcccaaatgctctgatctattaatactttttttttctttctttttttttttttttgagacagtcttgctgtgttgcccaggctggaatgcagtggtgcaatcttggctcactgtaacctttgcctcccaggttcaagcgatatctcgtgcctcagcctcctgtgtagctgggactacaggtgcgtgtcaccaaagccagctaattttttgtatttttagtagagacagggttttgccgtgttggacaggctggtattgaactcctggtctcaagtgatctgctcatctcggcctcccacagtgcttggattacaggcttgagccaccgcatctggcctctgaactttagatattgaaggcatcgcatctttctttttttgatgaactgtttttcccacagtgttatgtcttgtattatttaagcctaccactgtctcagagtcattgtggactagggcagattaagaaaattggagatccttttgtgactagacagatgtcttacaacttttaaatattttgataatttaccattaagaaagaacggcaatgataatggaagacacaagaggaaaagcctggccatcaagctgtatagcagttttccagaggcttttactttttattgggattggattatattaaccttacattcatgttccaaccgtgtaattttgccctaatacattattttaacttttctctagcttctgtagacatcatgattcctgtcttgcttgaatccgaatctgtatagcttgaaacagcattattactagtataagtgcaattacacatcatccatatgtgtaatacaaactggcagactaagaccccagccgatatgttaaatgcattggaaaggagtttttcacacatttaaattgtgttattttcttacatgaaagtgctcgatattattggtttgggctataataattgaatcacagttgaacttgaattcacccaaactgaaaaacatctcgtttgacctgttctgtatcagtgtgctaactgctgaaggtattaaaacactaggtgtgtgaaagcatattaaataaggatatgtttatttaaaaagcatccggtttaaatttgcaactaattttccaatttatgacatgcaaaaaaagtaattctccttttctgtcaccttgtaatttataaaaatcaacagaaaaataagttacatggtttgaattagtcatttagttttttggttttccagtatatgggaggatagaaattatttgacttcttgcttctgtttacatgattttgctctgagtaattacagtttattcttttcgtataaaggagttttcatatcttgaaaattgtccatctgagggtaagcatggtatgaatgtaatgcagtagaaatactacattgagagctcatctaaactctttcaaattcaaatgtgtcattgttttaagcagaattctctctaatcctaatgtttattgtttacatatgcatgaattcattccagagggggaattagaggatggtggctataggctttgttgggactggagctcatgtgacctgggttcagtcttggctgtgactctcaccaggtgtgcgaacctgggaaaaccacctaacctctttgttgcttagcttcctaatctgtaaaatgggcttaataataagcccattacctcataaggtaacctaccttacaggctgttttgaatcttcaaggttggaaggcagtgaaatgtgtataatggccagtgtatacacacgtgttgtagttaagatacattgtaaaggaacctgaaggtttcctctcccatttttgtagattgatggattagttttttttttttttttgagacggagtcttgccctgtcacccaggctggagtgcaatggcatgatcttggctcactgcaacctccgcctcccaggttcaagtgattctcctgccttagcctcccgagtagctgggactacaggtgtgcaccaccacgcctggctgatttttgtatttttagtagagacggggtttcagcatgttggccaggctggtcttgaactcctgacctcatgtgatctgcccgccttggcctcccaaagtgctgggattataggcgtgagccactgtgcccggctaggtggtatttttgataatttaggtcatatattaggttcaatactcagttcgcatatttcttaaaatttaatttgcactcataaattgaggaaatgaaatatacatgtatttattttaaacttttgaaattacactacaaactctgctttttgagtaattttgtgtttgaaataatataggaagtatttacatttattataacatatggaagctctcctttaataataattgtgataccatttgttgaatgtctactaatgtctactaggtgccagggttgttaagaataccattttagactgggtgtggtggctcacacctgtaatcacagcactttgggagactcaggaatttgagaccagcctaggcaacatggtgagacactgtctgtataaaatattaaaaattagctgggcatggtggctcactcctgtagtcccacctacttggaggctgaggtgggaggactgcttgagcccaggaagttgaggctgtagagagtcaggatcatgccactgcattccagcctgggtgacagagtgagaccttgtctcaaaaacaccccaaaaaccattttacaggttaggaaactaaacttgttggtctgacgtcagtttatgctgcatattccttaggaagctagtaaaaagtaaaaaagaaggtaaagttcatactcgtgctcttatactgagatgcgtattaagtaatgtgagttgagattcatattcggtgccatagtcttttttcttaaccccatcaatcaattgggatatgcatatttataactggtatcttggatctattaggacatatttactgaagactatatgtatttgtataatagtatgttagatttttttttttttttttttgagatggagtctcactcactctgttgtccaggctgtagtgatctcggctcgctgcagcctctgcctcctgggttcaagtgattctcctgccttctgctcaagtagctgggattataggcatgcaccaccatgcccaactaatttttctatttttagtagagacgaggtttcaccacattagccaggctggtcagcctcccaaagtgctgggattacagatgtgagccactgcgcctggacatagatttttattagttggtttttttacatcaggacatggagtgctattgttagtttatgatttgacctaattttgcttacaaaggagtgattactcaattggaacagacttaatgatgtgtaattgagaggaaatagaggaaaagaagatggactggattgataaattgttgtaaatttatagattatgtaacttgtcaaaagtgacagcatcatttatctagtatgtatattttaattttctccattgtgcgaaaataaatgctagaaacgatctttgcagatggactattgggccacagtcttaagaatttggtatatttatattccgtgttataactttcaccaacagtcttcatcatatgttttcataattgtgaatgagacccatattttagaaattttatttttatacctatagagctgacattttagataattttagaacaatcacaatgattaattttagaaatagtttttaagagtcgttaaatcgataaatgtgtatgtgtagaaaatttctggaaagatgcttaagaaacttgatagtggttacttttggaagaaaaagattggatgatggaagatactttctaccttacatccttgtatcctagtcctttctcttttatagcctccgtactatataaatgtttttctttaacaataattcagtgatacttaaaaaaagtaatagttaatagcacaagccacctgcagatctataggttatggttatatctatagtttctttgtcctttttcaaattacataatatttactttttgtttgccaaataaagttaacttattctttgtgtatctttttccttttattctcactgaaataccattttctttcactagtcagcatgatttccagaaaatatggtggccctttggggctatattattcatttgcaaatcatgacccgggaaaattaggttgcaaactgtacatgaatttggtattttattctccgtagtcattttataaaggaaatttagctatgttaccttcaataggttactttatttctcaagtcttttttttttccccttttatttagtcagacattcatttcataagattatctcccagggctctttcaaatctctcattctataagcatttcatacccatttcagctcaaaagatggcattcagtagttcttaaagtagtgttataaacaaaatttcttaaactagataggcttcagaataatctttaattattaaaatgcatttatttgcaatctaatttgtcttacaagctaattctaatgtagctcttcataaagtcagccatatacatacttaaaatctcagtcatggagttggatttttaaaagaaaatttccagtaatgcagatatattaacttcatatatatgtatttttaaaagaaaatcaaaatttcttctcttttttttttttttttttttttttaatagagcttggttctcagtatgttgcctaggctggagtgtagtggctattcacaggtatgatcctggtgcacctatagctggaactataggcatgtgccactgtgcccagctctcagcatttctgtttcttttttttttttttttgagatgtagtctcgctctgtcgcccaggctggagtgtggtggcacgatcttgcctcactgcaaccgctgtctcccaagtgcaagtgattctccttcctcagcctcccaagtagctgggattacaggcacccgccaccatacccagctgatttttgtatttttagtagagacggggtttcaccatgttggctaggctggtctcaagctcctgaccttagtgatctgcccgcctccgcctcccaaagtgttgggtttacaggtgtggaccactgcgccgggcccaacatttctatatctaatcttaatactagagaatgagccttttctttgtttggaacctgaaaggaaatgatgctttatgctacctgtagcttcacagataattacacagtgggttatcaaccaaagctaattaaactatgacagtttctttcgttaattgcattttagttggttcagttatggcaatgaggaaaatagttatgatccacaccctgagggtttactattttcaaagtgttgtatactgaaatacggaggtgtctggttatgaacctgtattacttgttcatatgtgaagtgcttagtgagacaatgaactgttaacttcatagagaactgcatttggttatgcggcctttgaaaaatgaacaaaatcatgaaatttcttaataacttttctaatgtcttctcaaataaaaggagtgggattatctttgctggaatccaaattgcaagccaaaagactgtgtcctctgtggatttctcagtgaactagtttgcaggggccaatgtgagataaaaatgcaattcctggaatttggtttaagagtaaattgaaatgtagtataagtagggtacatgagtcctttttttggctggtctgtgttgaacaaagacctagtagctgcatgcttggaaagctttcctgtgttcatgcaatcttcgtccttattgtagccaggcagctgaggagatatcccctaaagaggcgaactccccatcctcccacttctgcttttaatttttttttttttttttttttttttactatatactgggacagtgaaaggccttccattgaccagaattacaaagagtgctttcatgctcagggtttagccatacccagtgtacagggcttttgttagggcttgcactagtcctttctctcttacctccctcagtcttattattcatactttgcagcagcaactgtatcattttgagaattttacttccttatttaaaaataaatagttgcaaaagaaaaattcagttttttataatgaacaatgcaaagcaaagcttttattgtgtttatttggataaagaaaatacactgttatagctgagtgccacactgcagcatttggttttgttgaaattactctttgtcatttaaaaagtacagtcaaaataaacattatttttttgtgtgtgaccgtatctcatctaactcattgttggtgcttgatactcattcatgagatacaagaatcttttaccagtgccaggtgattttgaaaatattaatgtttttatgttagataagatgaaaaggagagtttagacaattatgtggataattcaaaaatgcctttagcctcagttcagattgacatatctccttaagattaatcttgttagtattgtctttgtccttcacctttcttgtatagaagttaaccattaaggtgaaataaaaaagttattatttaatagatattacatttggatatgtagtctttatcagatagagctggactatattttacaattttatttccaatttgcaatacccaagagttctctttcatttttttatgcaagtgattaatcttttaatgaaatgtttaatgcatatggaaaattataaaaataatataacagatacttgtgtgcctgccacccagctttgttgtatttgcttttttttttttttttgagaaggagtctcactctgtcgccctggctggagtgcagtggtgtgatcttggctcactgcaacatccgcctcctgggttcaagcgtttctcctgcctcagcctcctgagtagctgggattacaggtgcacgccaccacgcccagctaatttttgtatttttagtagagacagggtttccactatgtttgtcaggctggtctcgaactcctgaccctgtgatccgcacccccctcagcctcccaaagtgctgggattacaggtgtgagccgccgcgcctggcctgtattttgatattttaaacgagattttggaggattttgttgatcctaatatccgaatctgtgtcttatttatggttattttattttctcatttgtctcaaatttccctcctagacaagtcatttgttaagataaacctagtgagtacccttgattacccttgatgttacatggtttctgctggaaagtatcaaatagaactttcaaaattgtatttaacaatctcaatattaaacaagctgatatactaaatttttagatactaaagcttggttgtcacatattctaagaagggaatataatgtattacacatggtgaaaatttatttcagatatgttatatggactgttgtacaaatacaggattgaagtctgagaaattttctgttattctgtcattaattcagctgctattgaagtattgtacctcattttgacctttattattagacgattgctcttagagctcataatagtagcagtggtttgttgtatgcctacaatatacaaggccctgggtatcctttaaattgtctgggcacagtggctcacacctgtaatcgtagcactttgggaggctgaggcaagaggattggttaaggccaggagttctagaccaacccgggtaacaagatgagactcctgtctctacaaaaaatttaaaaaaaaattagctgggcatggtggtccctacctgtatattcctagatacttgggagactgaggcaggaggaccgtttgagcccaggagttcacgggtgcaataagctgtgatcgtgccattgcatcctgcctgggcaacaaagtgagactctgtttctttaaaaacaacaacaacaacaacaacaaattattctaataaatcgtctcatttaactgtatacagagagctgtatatcagctctctgaagtagtacacattttttttccccttcattttgcaggtgaagaaacaatcttatacagacacatttcactttatttcacctcagtctgttgcacttcacagataacttgtttgtttgtttcctaacaaatttaaggtttgtggcaactgaatgaagcaaagcttttggcatcattttcaacagcatgtgctcacttcatgtctctttataattctttttagtgatctttgatcttactattgtaattgttttgaggtgccatgctcatgtaataaggaaaacctagtaaaaaatactgtgtgctgattgctccactgaaaggccattcccctctctccccatggaccttgctctttcctgagatatattgaaattaggccaataaccctgcagtgtcctctgtgggtcatgtgaaaggaagggttacatgtctcactttacaatagctagaaatgattaagctttgcaaggaacgtgttagccaagttgtgaatgcaaaggaaaagtttttgaaggaaattaaaagggctgctccagtgaacacatgataagattatactaagatattttttgcccttattttgtatacattttcgccaactgtgaaaatgtaaactgtaattgtaaattaaaaaaaggtttttttccgtagagatggggtcttaccatgttgcccaggttggtctagaactcctggccttaagtgttccttttgcctcagcctctcaaaatgctaggattacaggcataagcaaagtgacttgcacaattgatttgctgctggcaccttagcacaaatcaaggttagtggtaccaaaccgagctaataataacgattgagtttttccccaacatgcacattgaaaacaaacaaaatgtcagttttacttttcacttaatatctttgatgaaacagcaaaaaaaattttttttattaagtgttggccttcgaatatacatcttcttaatattctgtgtgataaaatgggaagtacacataaagcagttctgttgcataattgtccaacagtggtcttaatgaataacacttgtgtgagtgagtggcaagccgaaatggcttttttcaagcatcaccattttgaaatgataaactggttatttatgcttggatattttccagataaattatcaaaaatagatgactgtgcttgtgatttcaaggaaaactgttgccagtggtaaaattacagctttcaagggccgggcacggtggctcacgcctgtaatcccagcactttgggaggccgaggcgggtggatcgagaacatcctggccaacatggtgaaaccccgtctctactaaaaatacaaagagtagctgggcatggtggcatgcacctgtagtcccagctactcgggaggctgaggcaggagaatggcttgaacccgggaggcggaggtttcagtgaggcgagatcgcgccactgcactccagcctggcaacagagcgagactcgtctcaaggaaaaaaaaaaaaaagtacagctttcaagtgaaaattagaattttggacagttgtatccaccaccatgaacttgacaactttccaatacttaatagacttttctgatgagatcagtagcgatatgaacagataagatttaaaaaaattgagacagggcctcactgtatcactctggctggagtgtagtgctgtgatcatggctcattgcagcctcaacctcctgggctcaggtattcttgccacttcaacctcccaagtagctgggaatacaggcatgtgccaccacatccagctaattttttgtattttttgaagagacggggttttaccatgttgctcaggatagtctcaaactcttggctcaagggatcctcctgcctcagcctcccaaagtactgggattacaagtcatgagccactttgcctggcccagataagatttttgatactgtacaatgaaatgtgtcaaggaagacctgtataacagtgcaccagtattttccaggtgaccaatgaatgatgttacaaaatcatggacaggtgaaagatatatttaaaatgcagtatagaccagttgattttactgtaacagcacatggaaagttgattcatttggttttagattagaaatttcacctaagttttaaaaactatcactcattgaattttggtgtaattaaaaaaaaagcccaatatttaggaaagagtgttaaaatactcttcttttttcctggtctaagaccaggttttttccacagacttcaaaataacatgtaacagattaaatgcagaagcacatgtaagaattcattcttctgtctgaatccatttgatagaatttaaaaaaaaaatcattcagcctaagaaagcttattaaaaaaagaaaacaagaattcagctggtctaccattaaaccagacatgaaagtgatttgcaaaaaatgtacagtgctactcttctccctgcattaaaaaacattacatagctctttttttttttttttttttttttttttgagatagggcctctatcagccaggccggagtacagtggtgcaatcatagctcactgcagcttcgactcctgggctcaagccattctcagcctcccaaagtgctgggattacaggcatgagccactgcactcagccctttttctaaatatttatatgtttctgatttttaccactcacatttattttaaagtctttataagttggctatctttgagaaatggcatttgatttttcaaaactttttttggtagagttttaaatttggacttacgatactggataagtagtgattagattgtgctgaaatttatggaagaaagtcactttgagtatgccccttctacataagaacatagaatgtgctgaaaagctttctatttgagaatatttttattataacatgctttcctttaggcgttttattttgaaatgaaatgctgctgaatgctataagaaagaaaacatctttgtgggaattgggtatatctagaatgagaaagtaaaatattgcctgtagaatttttatacctcagaaaaaccaaataaagtaacattgacttcacatgggtatccatcttaagaaattatgtttagagttttgatagtttgtaggatttttttttctcagtaagggcattttaattgaatttaggaagtaaattataaatgatgtaaaagtttgtattcttcctgttaatgttataaccaaaagctaaaagataatgtagttcactgttttgcttagtgatcaaaaattttattttgtttattcattgctgttcactggaagacctgctgtcttgggtggctctgagtggggtgagattgacttgtagaatggttttcaactcttactggttgtgaatttacaaatacaggtagtgaggaaaagtttttccagtgtactctgatattattgagaatgatgactacaggatgaaggaagagaattatattttctgagtggtggtagctaatattttatgttactgttgataaccatcagatcattcttctttaaggggaaaaatagacttaattaaaaagtgtaagtggaggcctttggagaagagtcttgctaataaagggggtaatgattttttccataattttccttcatagctggcatggtgagaacaagtatatttaataaactagatctttggcctgtgacaattgggtgaattaatttggctaatgacactagtcatctagatgtaagaaaagcagttttctctctgacccttctgtgaaaaatactttgagcagagaactgttattattctgtagttgataagctgctcaccttgggaatagctgttaaatcagaattaacagctttcatggcagagagacattctttcaggaagtgaataaatgcatgtaaaagttcaccatgcaaagtagcaaaagtcaatcagtatctttcagaattttgtcaaatgtgtagcagattgcattctttttagtttcttttttgtatgtcatgatatgtatatatctatctcacatgctcccacggacctacttttccttgtaataatattttattgtagcttttctaagctctaaagaatgaagttaggagatccgttggtgctcttaattaggaatctgggagagatgtcttaaaggctgtgtcacctggatagtccacggaaaggaaaactcatgatctttatggaagagctatgtataataatgaaatactgcttagtatgtgctaagcccatcataagccttattttgctaattctttccagcaatcccacagagtattgatgaggaaactgaagtttggagcgatcacatcattttcccaaggtaatctagctggcaaacgaatctaggattcaaatttttgtcttttccagcttcaaagtctatgccttcgtagagtgccacttgttagtactcaggaatgtgcaacacattctaaaagcaacagaaattgttcattttgtcctgaaatgtatcctgtgtttacattcagtgacagattaagtttatagcccatgtaattaaattttcattgtctcatttaataagagcctgaaagttccttttctgtacatattttcctgaaagataaattatctaagattagttcaaagtacagtcttagatgaactacttgtattagtgttttatgttcttcatagtttaacagagaaagtcaagtgttttggcatagattggatgcagacattaaggaagaaacaaaagtgtttattagttgcaatggttgaataatacagtatttacaaaaagttactctgggtctgggcgcagtggctcacgcctataatcctagcactttgggacgctgaggtgggtggatgacctgaggtcaggagtttgagaccagcctggccaacatggtgaaaccctgtctctactaaaaatacaaaaaaaaggctgggcgtggtgcctcacacctgtaatcccaagcactttgggaggctgaggtgggtggatcacctgaggtcaggagttcgagaccagtctgaccaatatggtgaaactccatctctactaaaaatacaaaaattaggccaggcgtggtggctcacacctgtaatcctagcactttggaaggccgaggtgggcgaattgcctgagctcaggagttcaagatcaggctgggtaacatggtgaaatcccgtctctactaaaatacaaaaaattagctgggcgtggcgatgtgctcctgtaatcccagctactcagaggctgagacaggagaattacttcaacctgggaggtggaggttgcagtgagccgcgattgcgtcactgcactccagcctaggcaacagagcgagactccgtcttaaaaaaaaaaaaagagaaaacgttactctgaaacctgtgctgaattatagcatttagatgctgaaataagagctccctgtagaatgttggttagatttgaatatgaatttacctgccttgtcatcaaattatccttttaagaaattaaaaaaatatagaagttatccttatgattgtgcacatttatatttcactttactttaaagtttctactttacaatttgttggccgggtgtggcggctcatgcctgtaatcctagcactttgggaggctgaggcaggtggatcacttgaggtcaagagtttgagaccagcctggtcaacatagcgaaacgtttccatctctacccaaaatacaaaaattagctgggtatggtggcatgcacctgtaatcccagctacttgggtggctgaggcgggagaatcgcttgaacctagacgggggaggttgcagtgagccaagatcataccactgcactgcagcctgggtgtcggagtgagattctatcccaaaaataaaaaatttgttacagtctctgttgaaatgggccatacacttcatttcagtgttgtgttagtcctcaaaaattagcaataattcctagaggaactgctacattcagatgcttcctctgttccttacattaaaaattgggaaatacataaattatactgtggccaccaggaaactctggaacaaattaatggcccaagtttttgcaatattgtaggaatttatagactgctagtctttgtcttatttacttatttactttcatttaaatattctttttcttcttgttgttgtttcttttatacttattttaattttacagagacaaagtcttgctaggttgcctgtgctcgtctggaactcctgggctcaagcgatcctcctgcttcagcctcccaaagtgttaggattacaggcatgagccaccatgtccagtcccatttaaatattctattatttgtgttttttgtaagctatctcagatccattgtggaataaagcaagacataaaatagtggaaaaataaacatcatgagcagggctgaaacaaagtaagggtacaaaacccttgtagctttttccttgagacagtcttgctcagttgcccaggctggagtgcggtgctgtgatctcagctcactgcaacctctgtctgccaggttcaagcaattgttgtgcgtcagcctactgagtagctgggattacagatgtgcaccactatgcccagctaatttttgtatttttagtagagatggggtttcttcatgttggccaaactggcctcaaactctttgcctcatgcgatccacccgcctcatcctcccaaaatgctgggatttacaggcattgagccaccacacctggccccttgtagtttttttttttttttttttttttgagatggagtctcactctgtcgcccagtctggagtgcagtggcgcgatctcagctcactgcgacctctgtctcccgggttgaagtgattctcctgcctcagcctcctgagtagctgggattacaggcatgtgtcaccacacccagctaatttttgtattttagtagagacggggttttgccatgttggccagactggtctcgaacacctgagctcaggtaatctgcttgccttggcctcccgaagtgctgggattacaggtgtcagccaccacacctggcctcttgtagttttaaaagataaaacattaatttctttaacatctttaagcatttatattagtccttatatttaagccttcatattcagaaaataatgaaatgaaataccttactaaacttaatagcgtcctacactggaaggatgtaatagagtaaaattgacaacccgttttatcaacattcccctcctttctccattgtctagtaatcttactaatgatgagtgaaaagacaatagaagtagttatacatgtttatatatattacatataaatatgtacagtagtttatatgtaatacagggaattgatttctgaataatagggttgattgtacatctgttttatatacctagcttattttagaccttcctcatggatattacctaagagatggtttcttagcaagtggtcagattttctttgtttattctttcaaagattgtattttttgtttgtttctttgagacagggccttgctatgtgcagtggttagagtgcccaggctggagtgcagtggtgtgatctcaacactgcatcctctgcctcccaggcttaagcgatccttccgcttcaatctcctaagtagctgggactacaggtgtgcgccactgcgcctggctaattttgttattatttgtagagatgagttctccttgtgttgcccaggctggtcttgaattcctgggctcaagcagtcctcctgccttggcctcccaaagttctgggatcgcaggcacaagccaacctggccaaaaaagaattgttataacttgtataagctgggcatggtggcacgtgtctgtagtcccagctactcgggaggctgaagcaggagaattgcttgagtcggggcagttgaggctgcagtgagccatgattgtaccacttcactccagcctgggtgacagcatgagatcctgtttcaaacaagaagaaaaacagaaatcaaataacttgtatgaatagctgtaatgctcacactaatagtatcacttgtttcattaataaaactttatacattggacagacctattaagattatagctaacttgtggagacccctgctctggaacctcagaactcatctcttagccaatacaacttgtgactgtaaatgctaagctatttttaaaaattggatagttttcaggttgggcccggtagctcattcctgtcatcccagcactttgggaagctgaggcgggcagatcacttgaggtcaggagtttgagaccagcctggccaacatggccagtctttactaaaaatacaaaaaaattagctgggcatggtggtacacgcctgtagtcccagtttttaaggaggctgaggcaggagaattgcttgaattaagaggcagaggttgcagcgagccaagatggtgccactgcattccagtctgggtgatagagtaagactccatctcaataagtaaataataaaatcaaaaattggatagttttctaaataaccactatgatagtaacatttattgagctttcctatctgccagacagtgttagatgctctgaatatattatttctgttccaggagagagtttgcattttcccatactttttttgttttaaatgctgaaagaaattttagcaatatattgtatagagtacagtagcccacgtggtgtaaaacttgattctctggttttctgtagggctgataggtaagttgcccttgtcctgatgtgtcaacagtagagtgtaaagtgtgaagagtattttgaatacaatagtcatttctgtgaatggctaccgtaacatctgttggttttcctccaacctcagtggccacttctctgcaagttgctttactaattcctcctttgtcttattgtcaggtgctttaccttcttcctttttttaattttttaattttttttggcattaaatgctatttttatgttcattactttcaaatttgtatctttggatgagagttctagcctgaattgcatattcatatattcactttgtgtatttacatctcctcctggatttttcataggcatttcagaatttttatgctcaaaataaaacttttgatttcctttctacttctatttcaacttgttcctttccagttttggcgagtagtactgctgtctgcctaactactcaagatacactatctgtaaactattcttggttattcctttccttcatgcctcttatgcaatagctattccccttggttttactatctaaactagtccttttctcgccattcatttctgttatcctactgtcttctaggccactaccttttatttggacaactgctataatctctcagctttttttctttcctctcttacccttctcaggtttattttttataaaaaatgaatggtctttaacagtgctattatggatctcctctgtttaaattctcccattgtcgcctgttaaaagaattcatactgcttaccaggccctacaagcctctcagtgatgtagcttctgcttaaatttccaaactctaattgctactctcagcatagctcccttgatcctttaacaaaaaaaaaaaaaaaaagagacagggtcttgctctgtcacttaggctggagtgcagtggcacattcatagctcactgtaaccttgaactccttggctcaggcgacccttctgcctcagcttcctgggtagctaggactacaggcacatgcgaccatgcccagctaattttttatttgtatttttgtagagatgagttcttgacaagttgcccaggctggcctcgaactcctagcctcaaccagtcctcctacattggccttccaaagtgctgggattataggagtgagtctctgtgcccaaccactcttatcatccttgatcacagctgtttcccacctaaaacctgtaccccagatgcctaccttcctggaatgttctttccctttctcttcataggatgggcttatttgtattactcagatttcaattcagaaattacttctactttatctagaatactattaccttcctctcatgtcatttaaaaaagttttcttcataccattttcactattttattttttatgtattttatttaatcttaaaaaaacatattttaggttcaggggtatatatgcaggtttgtttatatagataaattgcatgtcatggtgggggtttggtgtacagattttttttttttcttttttttttaagacggagtttcactcgttgcataggctggagtgcaatggcgcaatcgcggctcactgcaacctccacctcccaggttcaagttattctcctgcctcagccacctgagtagctgggattacaggcttgcgccaccacctatggctaatttttgtattttttgtttttagtagaaatgcggtttcaccacgttggccaggctggtcttgaactcctgacctcagatgatctgcctgccttggcctcccaaagtgctggtattacaggcgtgagccaacgcacctgacctgtacagattattttatcacccaggtaataagcatagtacttgataggtagtttttcaaccctcactctccactcacacttcaccctcaagtagaccttgctgtctattgttcccttctttgtgtcaatgcgtactcaatttttagctcccacttgtgagaacatgcagtatttggttttctgttccttcattagttgtcttaggatgactttcagctccatccatgttgctgcaaaggacatgatctcattttttttttatgggcgtgtagtatttcatggtgtatatataccacattttctttagtctaccattgaagggcatttaggttggttgtatgtctttgctattgtgaatagtgctatgacaaacatacctgtgcatgtgtctttttagtagaacgatttatattcctttgggtatatacccaataatgggattgctgggtcaaatggtttaagttctttgagaaattggtaaactgcttttcacaatggctgaagtaatttacatttccacactagcagtatataagcattccctttgctccgcaacatagtcagcctctgttattttttgactttttaataatggccatcgtgactggtataaggtagtatctcattgtggttttgatttgcatttctctaatgattagttatgtggagcattttttcatatgcttgttggccatgtatatgtcttctttagaaaagtgtttgttcatgttctttgcccactttataatttttcctattttaattgtctcatttgtttactgacttttggtctgtttgctcccaatagaatgtaagtgccacaagttgtttggtttagtactttgtagctactcataaaatatttgttgaggatggatgaatgaagaaggatgttactagtgctttcaagaagacttttaagcatttgtctttctagtaccactttcctgctcatgatcatatcatattacttctagtttgagggccagaaaggggaattaacagattgaatgtcatgtagccggcattgttcagagtatttcatgtagggatttagttaatactcagagcaatttatggctgtttttgctatcaccattttataattgaggagctaatactttgaggttaactatgattacacagtttactaagggataacgttagaaatggaacccaagattgtctgactccaagacccctgcagcatgaaatggtaaggaattctgtggacaaactgctatacgaacacagaattttggtcacttaaaaagggagagatgtttttttttgttctgagacagagtcttgctctgttgcccaggttggagtgcagtggtgtgatcttggctcactgcaaccgctgcctcccaggttcaagcaattctcgtgcctcagcctcccaagtagctgggactacagacacatgccaccacactcggctaatttttgtattttttgtagagatgaggtttcaccatgttagccagactggtcttgaactactggcctcagatgatccacccaccttggcctcccaaagtgctgggattataggcatgagccagtgtgcccagcctggatcttgtttcttcattaatttttcctctttcattcttccactgctgtaagtttatcctcatagtcaccatttacccattcatctccagataaaatgaatcacactcaatattctctagggcattatttataattttattttatttttacagttctcttaaaacaggatttgtagaagttaagtgatatggagtagggaagatttaggattcctttttggttgcctccttgcctccttgctgtgtaaatagtgaacatttggtgtaggggactgggtagatggtaatagtcaagagtatggaagagggacagggaaagtgaatagaaagcagtataggagtagagttcagctgaccagatggactgggttaccagactgcaatttttcagtctgttattatagtacattaaatcaaacaaatcacaccaatgcttatattaaaagcattaaggagctttagtgagacattgtactatgaggagatccatgtgcttttacaaatattatcaatttaaaaaatacatccaaatatttcccccttatagtaactttgtcagaattaaagcataatatagttggtttcaatataaatttttagtactagtaaaggtggtttaataggaaagagaattgaaatggaatatatttgtgatcctgttccttttgctatggatggatacgttaatttttttctcttgacatttgttattttaatttttaagttattacttgaggttatagaataaaattaagaatttgctgccattattactgaattaacatttcactggactattggcatatcagaaattgctttcattattgatgactataaagaatacctggagaggaggaaaaataggaggatggagtggaagagatgacaagagtcaaggtggtgggagggtgtcaaataataaagaaattgttctaattattaagaacctaatcctgagtttaagccatatgtatactgtgtttcaaataataccatcaaatttttattaatgatgattttaagaatgtctctttagcattgtccatttattaacatagcaccataagtgcgtcatggatgaatttaattaatgtttggtaacttaaggtttgtgttatcaggtgtattatataaccatagcatttataatttgaagttggcagtctggtacaaagtgttgggggaaaattgttttattaggtaaaaatcagggtttgcaatctgtggcccactggctggctacctgtttttataaataatttttgtatttttaatggagacggggtttcaccatggtggccaggctggtctcaaactcctgacctcaggtgatcaacccaccttggcctcccaaagtggtgggattacagacatgagccactaagcccagccagaaatacctccatttttaaaactatttcctttttggtgtttgtcttttttcctcagatagcttaccatataaaactgcaacattctttagttgctttctaggcctgagaattcacagcatcttaattgggctttggtgcatgtttcataaatcttctcaagcttatcccattttttaatttgtaatttatgatttcatttataagttttttgtatataacttataactttaacagatggccgagctctcaagtgtgatgaaaagaaaggttttttttgttaccagttatactctgaaggtctgggtgtactttattgtagttccctgcctgtgttgcagaatacaaattatttgattcaagaaagtatttatgatacgttcttggacaatataatgatgtaataaatataataataacataaaggtgaaatttgtagctgtttgatcagtttcactcaaagtggtattgattacattgatttaaagttggaggaatgtctgttggaatgagtccctccctcccaccctcccttccttcctttctttctttgttccttccttactccctccctccctcggtttttttttggttgtttttttttttttcctgagaccctgttgcccaggctagagtgtagtggtgcaatctcggctcactgcaacctctacctcctgggttcgagtgattctaccacttcagcctcctgagtagcttggaattactgatgcccaccaccatgtctggctaacttttgtattttttggtagagacagagttttgccacgttggccaggctggtcttgaactcctgacctcaagtgatctgcccacctcagcctcccaaagtgccgagtttactggcgtgagccaccgtgctcggccctattgcatattttatcctgcagtgatttaaattaagatgaaattcttgaccaagcacggtggctcatgcctgtaatcccagcactttgggaggatgtttttcattgatagttaaccatgatttttcactttgtgaagttatttttaccgttaaactttgatctcttttttatctgaaaatacgtcgacttatttctaggtaccgtaactaaatctctccttaggtatattgacagtcttcatctgatttagtataagcgtgctttgacttgggtttattggctgtggagaaggatcttttcttgatactagtgaagagagaagtttgtcaggagtagtgtcaaaaagcaggttgggtggtttccatcttgtgaagtcattaagcaagatttgaggagtgtggatgatcctatattgcttttttcctgtcattgaaaaagaacgtagtttgccgcccaagcccagctgttttcctgtgtggtgcctgttttactgttactgttgcataacaattctctttgtttgtgtagattcgcaggataagccatactacttctttttttttgtaagagatgggatctgcctggagagcagcctggcataatcatagtgcatttcagccttgaacttcatgggctcaagggatccttctgcctcagactcctgagtagttgggactataggcacgtgaaactgtgcttggcaagccatactttttttaagtctattgaaccggatcatgatgatgaaacattttgagtttatgacttctttctgcaatattctggatcctggggtgagagtggtagaacagataagatgcttgtctcaccatggagttctaatattatttttaaattacatgcaataatatttactttttttggtaacagcattattgagatataattcacacaccataaaattcagccaattaaaatgtacaaatgtacagttaactgtattaaattatacttaatatccagagttgtgcatccatcaccacagttttagaatgtttggtttatctcaaaaagaaacccaggatcctttagcagtcaccctccttcctcccacctctcccttcagcttaggcaaccactaatctactttctgcctctatggatttacctattctggacatttcatataagcagaatcacatgatatacagtctttggtgattggcttctttaacttaccataatgttttcaaggtttatccgtaatgtacatgtatcaccactttctttttattgccaaataaaattccattgtattgatatgccacaatttgtccatctaacagttgatggacatttatctccacttttttgctattatatataatgctgatgtgaacatttgtgtacaagttttacatggacatgctttttatttttctgttgaatacgtgcctaggagtgaaattactgaaccatatggtgactctattgcttaaccttttgaggaactgactattcatttattttggatatatagtttctaagttctgaaaaatgaatggtttttgtaacctactgtgtagaagacacagaaaacttccatttaccctgttatattccttcaatgatgtccctttgtggataaactctgcccccaacctctaggccctggcaagcactgatctgctttccatttctacatttttgtcttaactagtatattatataaatggacttacagtctttttgagtctagcactccctcagggacagggtctcactctgttgcccaggcaggagtgcagtgagtctagcttcttttacttaaaataattagcatttgagattcattcatgtctttgtgtttattaatagttaattccttttaaatgcctactagtattccattatatggatgtaccatagtttgtctattggccagttgaagatatttgactcatttctagtgtttttggccattatgaatgaaactgctgcaagcatttgtgttcagggttttgtgtaaatttaagttgtcatttatgttgggtaatacctatgagtgggactgctgagtcatatggttagtgtatgtttaattttataagaaactgccaaactgctttccaaagtgactataccattttgcactctaccaacgtgtgagatttccagttgctcctcatccttatcagcactcattattgtcatttttttatggtttcagttagtgtaacaggtatagtgatatctcgttttggttttaatttgcattcattaatgatgtttcattaaggaagtaaagagccttttgtgtctttatttgtgacgtgtatattttctttgattaggtgtcattcatttaaaacttttccccatttgaggctaggcacagtgggtcgtgcctataatcccagcactttggaaggctaaggcaggagcattgcttgaactcaggagtttgggaccagcctgggcaacatagcgagacttcatctttacaaaaaatgaaaaaattagctgggcatggtggcacataccagttacaggttgagctgggaaggttgcttaagcctgggagatcaaggctgcagtgagccatgatcctgcaactgcactccagtgtggggcaacagagcaagaccctgtctctcaaaacagcaaccacagcaaacttttgcccatttgaaaaatattaggttgtttgttgtcttgttattgagtgtttagtttctttcttcttcttcttcttcttcttttttttttttttttttttcgagacagggcctcgctctggttgcccaggctggagtactgtggcgtgatctctgctcactgcagtctccacctcctgagctcaggtgattctcccacctcaacctcccaagttgttgggattacaggctctaacatgcctgcctaattttttgtgtttttagtagagatgcagtttcaccatcttgcccaggctagtcctgaactcctggactcaagcagttcacccacctcagcctcctaaagtgttgggattatgggcatgacccattgggcccagcctagtttcttcatgtatcctagatacaaatcctttatcttatttacgtaagttttaaaagtatttaccacagtctgtatcctgtctctttgttcttataacaatgtctttcacagtggaaatgtttgtagttttgatgatgttcagtttatcaattttcttctttttaaaaaatattttgtagagacaaggccttgcttgctatgttgcccaagctggtctcaaattcctggactcaagtgatcctcccacctcgtcctcccaaagtgctttgattacaggcatgagccactgtgcctggtcatatcaatttttttttttaaatacatcatgcttttgatgtgttatctaggaactcttggcctaatccaagataacagttgtttcctcttattgtttcttctaaaagattcatagttttctgttttacactagatccacacattttgaattaatttttgtacaaagggtgaggtgttggtagagagtgtcattggtttgcatatggtttttcagttgtttcagcaccatttgttgaaaagactatttctccacttaattgcctttgcacctttgtgaaaaatcgattcactacatttgtgtgggccttcttacaggttgaatattctgttcattgatttgtttttatgtccttttgccagtaccacactattttggttttcaagtgttaattttaaggttggaatgttttgtctaatgcccccttccttttggtttttcaaagttaaaaacttcatttttcctatcataaaaaacagacattttattttacctgaggtgacatatagcaatacctcaaattcatgagttactcctttcttcctatctggattgtgaacaacagtttgagatactgaggtagaggatatgtcaagttgaagatgctgtggatgactgcgtgtcctttttcctagggatacctactgaaagtggttgcattgtgtacaagtctgatcattagctgcatcatcttagcacacagcaccttttttcgatgaaaagagtctcactccttttactccagaaaggaaatacaaaattggaaagatcgtgtatccttgatagaatctgcacactatttgtacagaatagtaaagccaaacttagaagaatctcctctgactattccatagtcatggttcttttatctatttattttaaaagtttattttttgtggtaaagtatacataacacaatatttaccattttaatcatttttcggtgtacagttctgtggcattaagtaaattcacatcatgcagtcataaccaccattcatgttcaagattaatcatgattattttttaacctaagttccatcactgaaacttctagcacattaaagttacattcactttttgaaattacattttaacaatgctctagcatttcaggtcaatcaaggccttaacatttttgtaaatcttatagttatacccataaaaactttcagccagtagtataacttccagcaaactttgactttcgtcatatgtgagtagcattcagttagtctttaaaagatagctttttaaagtctgccaaatgtatgtagctcacctattattatccccatctatgtccagaggaatttggcatatcagcatgttttattttggttattatcaaggccatttgagtggttcagatgtaggacccaactggaattgttaacttcaacttgtttttgttactgatatttcttcacagtgggcaattaaatttatgggggacaagtgtaattttgttcaatggatatactgctgtagtggtgaagtcagggttttcaatgtgtccatcacttgaaaaacatatgttgtacccattaagtaatttctcatcatccccctactccttgtgagtctttgttttctgacattccacactctacctccatgtgtatacattatttaaatctcaacagtaagtgagaacatgtgatatttgtctttctgagttgtttcacataagatcatggcttccagttccatctatgttgctgcaaaagaatgacctcatttttttatggttgaatagtattccattgtgtatatatactacatcttctttatgcagtcatcttctgatggacacttaggttgattccatatttttgctattgtgcaaggtgggcatttttgaggagagaggcttactttgttgccttctgcctttgctttgccatatggattgattgtatttgaatctgaattgggcattagaaaacactgttaaagcatattagtctgttgtagaactaaaaatgtgagggcattagaaacttcatttgaaacttttgtgagtgtatcattcatttttgcatatgaatatcattttgtctcacagaaaatgtgtatgtgtatttttatcttgtgtagaaataacagcgtagtcagcagccattgttgcatagtctctggcaatattgttttgttttttttttgtttgtatgtttctaaacttacaggatatgtttctgggtaaacttaaaaatgactagcaggaaatcaattggcaatatgtgctgacttgtatctgagttaatagaaaatcagagccagaacaaggggttttctggctaagctctttgagactaatgtttctggatttgttaaaaatctaatataggtcaggtgtagtggctcatgcctgtaatcccggcactttgggaggctgaggcaagaggattgcttgagcccaggagtttgagactagcctgggcaatatagggagacaccatctctaccaaaaaatttaaagattagctgggcacgatggtacacacctgtagtcccagctactctggtgagtgaggtgagatcacttgagcccagaaggttgaggctgcagtcagctgtgaacccaacactatactccaaaacaaaacaaaatctaatataatggtttctagttgtgtacgttccagagatactaattgcaaagattcaatgataaagaatagtatagtcttgcaattctaaaattccaagagcttggaaaacttattctttttcttgcattggtaaatttctggacagaagggtagaagtttgaatattcatatattttgctgtagagatattaatgtgtttgattaagggtgctgcctagattctgctaggcgtgttaagtaatatacataaccactgtatttgctttccaatagggtttttggacctgaattaacagccagcattaaattgagttgaaacagagtttaaaattggttagttttatttccctagatctcaatggtaaaaggtaaggagagcaaaggaagaattgcccaggtgaatatttgggctcgagggatcctgtcatcacagctttcttagtggctggaactacaggtatgcaccactgtgccaggctcttttttaaaataggttattttttcttttgtaggggctatttacaaaaagaaatcctggcttttattattattattattattattattattattattattattattatactttaagttctagggtacatgtgcacaacgtgcaggtttgttacatatgtatacatgtgccatgttggtgtgctgcacccattaactcgtcgtttacattaggtatatctcctaatgctgtccctcccccctccccccacctcacgacaggccccggtgtgtgatgttccctttcctgtgtcgaagtgttctcattgttcagttcccacctatgagtgagaacatgtggtgtttggttttctgtctttgcgatagtttcctgagaatgatggtttccgtcttcatccatgtccctacaaaggacatgaactcatccttttttatggctgcatagtattccatggtgtatattatgtgccacattttcttaatccagtctatcattgatgggcatttgggttggttccaagtctttgctgttgtgaattgtgccgcaataaacgtatgtgtgcatgtgtctttatagcagcatgatttataatcctttgggtatatgcccagtaatggagtggctgggtcaaatggtatttctagttctagatccttgaggaatcgccacactgtcttccacaatggttgaactagtttacagtcccaccaacagtgtaaaagtgttcctaaggaaatcctggctttttttaaaaaaaaaaaaaaattttttttattatactttaagttttagggtacatgtgcacaacgtgcaggtttgttacatgtgtacatgcgccatgttggtgtgctgcacccattaactcgtcatttacattaggtatgtctcctaatgctatccctccctccttcccccaccccatgacaggccctggtgtgtgatgttccccttcctgtgtccaagtgttctcactgttcaattcccacctatgagtgagaacatgtggtgtttggttttttgtccttgtgatagtttgctgagaatgatggtttccagcttcatccatgtccctacaaaggacatgaactcatccttttttatggctgcatagtattccatggtgtatattatgtgccacattttcttaatccagtctgtcattgatggacatttggattggtttgaagtctttcctgttgtgaattgtgccacagtaaacatacatgtgcatgtgtctttatagcagcatgatttataatcctttgggtatatacccagtaatgggatgcctgggtcaaatggtatttgtagttctagatccttgaggaatcaccacactgtcttccacaatgtttgaactagtttaccgtcccaccaacagtgtaaaagtgttcctatttctccacatcctctccagcacctgttatttcctgactttttaatgatcgccattctaactggtgtgagataatatctcattgtggttttgatttgcatttctctgatggccagtgatgatgagcattttttcatgtgtctgttggctgcaaaaatgtcttcttttgagaagtgtctgttcatatcctttgcccactttgtgatggggttgtttgtttttttcttgtaaatttgtttgagttctttgtagattctggatattagccctttgtcagatgagtagattgcaaaatttttcttccattctgtaggttgcctgttcactctgatggtagtttcttttgctgtacagaagctctttagtttaattagatcccatttgtcaattttgtcttttgttgccattgcttttggtgttttagacgtgaagtccttgcccatgcctgtgtcctgaatggtattgcctaggttttcttctagggtttttatggttttagatctaacatttaagtctttaatccatcttgaattaatttttgtgtaaggtgtaaggaagggatccagtttcagctttctacatatggctagccagttttcccagcaccgtttattaaatagggaatcttttccccatttcttgtttttgtcaggtttgtcaaagatcagatggttgtagatgtgtggtattatttctgagggctctgttctgttctgttggtctatatctctgttttggtaccagtaccatgctgttttggttactatagccttgtagtatagtttgaagtcaggtagtgtgatgcctccagctttgttcttctggcttaggattgtattggcagtgcgggcccttttttggttccagatgaactttaaagtagttttttccaattctgtgaagaaagttattggtagcctgatggggatggcaatgaatctataaattaccttgggcagtatggccattttcatgatattgattttatgaggccagcatcatcctgataccaaagcctgacaacaacaaaaaaagagaattttagaccaatatccctgatgaatattgatcctcaataaaatactggcaaaccgaatccagcagcacatcaaaaagcttatccacagtgaccaagtgggcttcgtcactgggatgcaaggctggatcaacatacacaaatcaataaatgtaatccagcatgtaaacagaaccaaagacaaaaacacatgattatctcaatagatgcagaaaaggcctttgacaaaattcaacagcccttcatgctaaaaactctcaataaattaggtattgatgggacgtatctcaaaataataagagctatttatgacaaacccacagccaatatcatactgaatgggcaaaaactggaagcattccctttgaaaactggcgcaagacagggatgcccctctctcaccactcctattcaacatagtgttggaagttggccagggcaatcaggcaggagaaagaaataaagggtattcaattaggaaaagaggaagtcaaattgtccctgtttgcagatgacgtgattgtatatttagaaaaccccatcgtctcagcccaaaatctccttaaactaataagcaacttcagcaaagtctcaggatacaaaatcaatgtgcaaaaatcacaagcattcttatataccaatgacagacaaacagagagccaaatcatgagtaaactcccattcactattgcttcaaagggaataaaatacctaggaatccaacttacaagggatatgaaggacctcttcaaggagaactacaaactactgctcaacgaaataaaagaggacacaaacaaatggaagaacattccatgctcatagataggaagaatcaatatcgtggaaaaaaaatttttttttaatagaggcagggtctcttgtggtctaggctggagctggcttgtttaaattgcatttttttaatttttgaaaaacatattcgtgtggttcagaagtaatgttaaaagactgtagctatggtcaggtgcggtggcttatgcctgtaatcctagcactttgggaggccgaggtgggtggattgcctgagctcaggagttcgagaccagcctgggcaacattgcaaagccccatctctactaaaaatacaaaaaattagccggctgtggtagcgcatgtctatagtcccagctgcttgggaggctgagtcacaggaggctgagtcacgagaattgcttgaacctggaaggcagaggttgcagtgagctgagattatgccactgaactccagcctgggtgacagagcgagactctgtctcaaaaaataaaaaattaaaaaaagaagactatagctgtttccaaagtaactgtattttaaacagtacatgttttgagaaatcctgttcggtatctttgtgaaatagggtatagtttagaaattctgccattactttatgtattatagaagttaacttccttttttatttcagaactatgtagaaataagaagtagagaaagcataaattgacattgacatcttggcctaaataagaaataatatagaaaaagaccctttgcattatttttttatctcctgatattagttgcctattttacctataaatcagtatttatttgatgacatttgtatccttgatcttcctttcaatgaggaaatgataacttgagtctttcactttaagaatattgcttatgctgaacattagagcagtagtttttcttgtagtggagtggggcaaggtttaggaacgttcagctgggaattataaatggaacattagtgttttggcagactgaaagacaatttctgtttattttcacttcttcttttctactttgtgcaaatccaccttttaaggaggtactgactgtaaacaaccccagtgccagacatgattaccattgatcaagaaggtttattttgaagagagttcatccttcatgaagtttcataaacatttgttctttaaaatgtattggtcctctcttttctgcataagtaggaaacattcatatcagtaatacatgtcatgtaatatcctcatggattcttggatttctctgatgaaatttagtctttgcaagtgtatttgcctagttggcatttgttgtagcatgtatgtagtgagtactttaataatcagagtctttaaccatcaaattatatttatttctgaaatttgtcttttgttattattctactagaaaaaagaaagaggagaattcgaaattttttacatttatatttctacttagagtcttaattcagtattgcataccatctatgtaatcttactaatagttttgcttgtacttcctaatgatataaatcacagcaatttgaaatacagaaatatcaagtggatgtactactgtatttcaatcatgggttatgaaaaatcagcatgttctggattattgtatgtgcatgttacactgctcatttattgaattagaattttaagtagcactatgaaaagctgttttgcctgtatcttgagctcagagggaaagaaacatccaatgatttatgcttggagatacagagtttggtgagaactggtaataagcacaatggcaggcagaattaggaaggaagtatgttgtagtgtacagagttttacatgggtcatttctttgaattcaaattctgtagaaaatttctggcagttcctgtctcatgctgatttatttaggcttttttttttttttggtagagaggtttgctaattgcaacttgttaaactcctgtgctcaagtgatcctaccacctcagcctcccggagactacaggtgctggcaaccacactcggctaatttagtagagatgaggtcttgctgtgttgcccaggcttgtcttgaactcttggggtttaagtgattctctcagtttgacctccaaaagtgttgggattataggcttgagccactgtgcccagccagttatttttagtacaaagtaaaggtggcagagtctcatcatgggtctaaagtttggacacttattgtatagttgtgtttgttttgagattccatggaatgtttatcatgggaaggcttttgaagagattgatttagtcattttaggacatttgaaacatttggtttttagttttagtggagaagtatataactcactaattgggtgaaaatgcttaggtcgttggtggaattttgtggttgcaattttctctaactattaagcatccatttttgaattctcttatccttaactcgctcttctagaattcctagaggacctgtgcaacaacctcttgaggatcgaatcttcactcccgctgtctcagcagtctacagcacggtgagtgtctgaaggttgtcaaattgtgtgtgtgcttttgtgtgtgaatccttggtattaattataggcagtgtttgtttgattgacacatgacaaatttttggcaaaaagttcaataaaattctgaatagaatgataggccctttccatatcatcttaatctaagaaatggagtgaaacaaatactgtgttaagatagagagacctgtcttatttttcctttctgtaaatattcacctctggccttattattattattatttttattattttgagacagagtttcactgtgtcacccaggctggagtgcagtggtgtgatcttggctcattgcaacctccgcctcctgggttcaagcaattctccctcctcagcctcctgagtagctgggactacaggcacgtgccaccacacctggctaattcttgcatttttagtacagatggggtttcaccgtggtggccaggctggtctcaaactcctgactgcgggtgatccacctgccttggcctcccaacgtgctgggattataggcagctttgtattctttttggactcttgagttttattttctttctggattttttttcttaaaaattttatcagttttacattttctaaactttaaattttttaagttttactttttattctccttgattacatattttcaaaatgctgaaagtttagaagagtgaacactttttttttaaattttgagatggagttttgctcttgttgccaggctggaatgtaacggtgtgatctcagctcactgcaacctctgccttcccagttcaagtgattctactgcctcagcctcccaagtagctgggattataggcgtgtgccaccatgccctgctaattttgttcttttagtagagacagagtttcaccatgttggttggtctcgaactcctgacctcaagtgatccaccacctcagcccctcaaagtgctgggattacaggcctgagccactgtgcctggccatgaacactgtttttaaccagaaggaaatttaattttttttcatttttaagagatcgggtctcactctgtcacccaggcaggagtgcagtggcatgattatggattactgcagccttgaactcctggcctcaagttatcctcctgcctcagcctcccaagtaactgggactacagtcacatgctactgtgcatgctaattaaaaaatttttttggctgggcacggtggctcatgcctgtaatcccagcactttgggaggccgaggcaggtggatcacgaggtcaggagatcgagaccatcctggctaacacagtgaaaccccgtctctactaaaaatagaaaaaattagccggacatggtggcgggcgcctgtagtcccagctactcaggaggctgaggcaggagaatggcgtgaacccaggaggcggagcttgcagtgagctgagatcgtgccactgcactccagcctgggcgacagagcgagactccgtctcaaaaaaaaaaaaattttttttggtagaggcaaggttttatgatgttgctcaggttggtcagactcccgagctcaagcagtcctcctgcctccacctcccaaagtgctgggattatagacatgagccattatgcccagcccatttaattttttatattagatgattcaaattcataaatgaagggaaaataattattttgaggattcttacttggttgagcaggctggtttcaaattcctgggctcaagtgatccacccaccttggcctacgaaagtgctgggattacaggcgtgagccaccatgcccagccatatgaaagaaaatttaaaagaggatgaagctaataatattagaagtaaattttaggtgttttacagtgaacctaaggtaatttaggggaattagggagtgaaacctatcttttaaatatttcggttcaacataccatttattcctgtggatatagataggataccttaaaaggactcatagtctactgagggagataagaaaataaataattctaatataaagtgatatgatagagaagtgattcctattattttgggttgtgaatcacttttagaatctgaaaatagttgtaatgctctctctttcaagaggcacatatacatagtgtttacatataatttcagagtttcccagatgtccatcaggccatttctttttttctttttttttttttttgagaaggaatctcactctgttgcccaggctggagtgccgtggctcgatcttggctcactacaacctctgcctcctggttcaagtgattctcctgcctcagcctcctgagtagctgggattacaggtgcacatcaccacacctggctaatttttgtatttttagtaaagatggggtttcaccatattggccaggctggtctcgaactcctgacctcaagtgatccgcccaccttgaccttccaatatgctgggattacaggtgtgagacactgcgccccacctcatcaggccatttctaagctccagattaagaacctttgattagagacaggaacgtgttaattgcatgcgaaaggaagaggtgacttcattgagaaagtgacacttaaagcagaagatgcaagacttctgtaggtagagaagagaaggcaaagccttctaggaagtgaagatccagaggcgtggttaatggaatggccagtagacagttcactatgacataatatgaagtgaaataaagagtatgtaggttggttgggggggttttaagctgatctttgtatatttgcaaattaaccaggcatggtggcatgtgcctgtagtcccatgtactttggaggctgaggcaagaggatcacttgaggccaggagttaaaggctgcagtaagctttgatcaaacctctatgctccaacctgggtgacagagtgagaccctcaaaaaaaaaaaaaaaaaaaaaaagagtatcatgtaggtaatggatatttttcttggtctgtctgaaggctcagtaacacctattgtagatcaattaattatttctgcagccccattcactcttagaattgacccagtttctgttataaattatctggtcaccctaatcattaggaaccttcagttcattgaaaaataacattttgaataacactttgaaaaataacctttgggccaggcgcgatggcttactcctgtaatcccagcactttgggagaccaaggcagacggatcacgaggtcaggagattgagaccatcctggccaacatggtgaaaccccatctctactaaaaatacaaaaattagccgggtgtggtggcgtgaacctgtagtcccagctattcgggagactgaggcaggagaattgcttaaatccaggaggcagaggttgcagtgagccaagatcgcgccactccagcctggcgccagagtgagactgtctcaaaagaaaagaaaaataacctttggctgattgtgctgtctcctacctgtaatctcagcacttggggaggccaaggcgggaagattgcttgaacccagtagtttgataccagcctgtgcaacataatgagaccccatctcaacaaaaaataaactagccaggcatggtggtgcgagcctgtaattttaggtagttgggagaccgaggcaggagaatcacttgagcccaggaggtcgaggctgcagtgtgatacatgattgcgcctctgaattccagcctggacagtagagcaaaatcctgtgtcttaagaaaaaagaaaacttaaaatatttttttctggcacaacctttctctaggtcttagttttttatagttttttcaaaaagtactatgcaaaagaacagcatcattgtcagaatccctcttaaaatacgataatgttttctaattacctaagtatactttcaccatttaattattatttttaaattaagataagtaaaaatgaaaacttctagtaatcctgagtgatttatggaggcaaatactataaccatttttggagtgtagcttgtctttcttgtcttttttttagaccctatgctttattctgtccctttatctcgtatcagctttttgtatgccattccttagataacatttcttaaataataaatggttatatattgtttattataaaagaatttaatcactcagcattgaatacttaagcttaagcttttactgtgtgtcatgcagtggtctaggtgttcaggatatggtaatggagcaacacagaccctcagccctcatggatattacatctttatgggataagaagacagcaaacaaatatatatacagtatactattgggttttagtaagtaacttgatgagaataaagcaggataaagggatagagaatgactggccattctaccttaactaattctctcagggaaagtctctctgaaaaggtggcaattaagctgaaactgaagatttctaggaaaaaaaaaacatttgtggtagaaggaacatcagtgcagaggcccagagataggagtgagctcaatgtagtcttagaaatggaagaaagccagtgtggctggaatggagggaggttggatttgagacatcagattatgtggactggtatggtttggctttgtgtccttacttaaatctcatgtcgaattgtaatccccaacaagtcaggggagggacctggtgggaggtgattggatcatgggggcagattttccccatgctgttcttgtgatagtgaatgatttttcatgagatctgatggttcaaaggtgtggcacttctccccttgctctctctctctctcctgccatcatgtaagacgtgccttgcttcctcttcgttttctaccattattgtaagtttcttggggcttccccagccacgtggaactgtgagtcagttaaacctcttttttttctttcttttttttttttttttaaattacacagtctcaggtagttctatagcagtgtgagaatggactaatacatggacattacagaccatagtaaagattttggattttaatctagatataatagaaagccagtggaggattaagaggagtaggtgtgaatttacttttaaaaggtcactgtggctgctgtatggagaatagactgtgtgatgtggacatgtggtggtgattgaaatgggagtaaggagaagtaaagtcagtagaatatgttgatgtcttggatgtgggatgtgagagaaaagagtaaaggtggtgtcgtagatcttggtttgggcaactgagtggtcctatttgtggagatgaatactgaatgaggaacgagtattttgttgaaaaaacctgagttataaaacctcataaatgaggacatgtaattctgtaattttattactttggagaatagatcatccaaatcctgtgagcaacagcacactgcctgtcatgcagtttacaggaaatatttgaatctaagcttttgaatgtatttttttagtttgatctaatttgatttttactatttaaaactactgtcatatttgtagtcctttgatcagttttaaaaaatcgagaccaggcatggtggctcaaacgtgtaatcccagcactttgggaggctgaggtgggtggatcacttgagctcaggagtttgaaaccagtctgggcaacatggtgaaaccctgtctctattagaaaaaaaaaaaaaagtgtgtgtgtggctgggtgtggtggctgacgcctgtaatcctagcactttggcatgccaaggagggaggactgctcgagcccaggaacttgagaccagcctgggcgacagagtgaaaccgttgtctccaaaaaaaaaatgtgtttgtgtatatattatgttttatgcctattctggaagaaaggtttttaggcagctaaaagttaccttaaagtgtgatagtctccactttttatttatttatttatttaacagagtctcactctgtcgtctaggtcagagagtagtggcataattacagctcatcgaagccttgaactcctgagttcaagtgaacctcctacatcagcttcctaaatagctgagtaactaggattacaggcacaagccaccgtgcccagctaattttttaaacttttttttttttttttttttttgagacagagtctcgctgtgtctnnnnnnnnnnnnnnnnnnnnnnnnnnnnnnnnnnnnnnnnnnnnnnnnnnnnnnnnnnnnnnnnnnnnnnnnnnnnnnnnnnnnnnnnnnnnnnnnnnnnnnnnnnnnnnnnnnnnnnnnnnnnnnnnnnnnnnnnnnnnnnnnnnnnnnnnnnnnnnnnnnnnnnnnnnnnnnnnnnnnnnnnnnnnnnnnnnnnnnnnnnnnnnnnnnnnnnnnnnnnnnnnnnnnnnnnnnnnnnnnnnnnnnnnnnnnnnnnnnnnnnnnnnnnnnnnnnnnnnnnnnnnnnnnnnnnnnnnnnnnnnnnnnnnnnnnnnnnnnnnnnnnnnnnnnnnnnnnnnnnnnnnnnnnnnnnnnnnnnnnnnnnnnnnnnnnnnnnnnnnnnnnnnnnnnnnnnnnnnnnnnnnnnnnnnnnnnnnnnnnnnnnnnnnnnnnnnnnnnnnnnnnnnnnnnnnnnnnnnnnnnnnnnnnnnnnnnnnnnnnnnnnnnnnnnnnnnnnnnnnnnnnnnnnnnnnnnnnnnnnnnnnnnnnnnnnnnnnnnnnnnnnnnnnnnnnnnnnnnnnnnnnnnnnnnnnnnnnnnnnnnnnnnnnnnnnnnnnnnnnnnnnnnnnnnnnnnnnnnnnnnnnnnnnnnnnnnnnnnnnnnnnnnnnnnnnnnnnnnnnnnnnnnnnnnnnnnnnnnnnnnnnnnnnnnnnnnnnnnnnnnnnnnnnnnnnnnnnnnnnnnnnnnnnnnnnnnnnnnnnnnnnnnnnnnnnnnnnnnnnnnnnnnnnnnnnnnnnnnnnnnnnnnnnnnnnnnnnnnnnnnnnnnnnnnnnnnnnnnnnnnnnnnnnnnnnnnnnnnnnnnnnnnnnnnnnnnnnnnnnnnnnnnnnnnnnnnnnnnnnnnnnnnnnnnnnnnnnnnnnnnnnnnnnnnnnnnnnnnnnnnnnnnnnnnnnnnnnnnnnnnnnnnnnnnnnnnnnnnnnnnnnnnnnnnnnnnnnnnnnnnnnnnnnnnnnnnnnnnnnnnnnnnnnnnnnnnnnnnnnnnnnnnnnnnnnnnnnnnnnnnnnnnnnnnnnnnnnnnnnnnnnnnnnnnnnnnnnnnnnnnnnnnnnnnnnnnnnnnnnnnnnnnnnnnnnnnnnnnnnnnnnnnnnnnnnnnnnnnnnnnnnnnnnnnnnnnnnnnnnnnnnnnnnnnnnnnnnnnnnnnnnnnnnnnnnnnnnnnnnnnnnnnnnnnnnnnnnnnnnnnnnnnnnnnnnnnnnnnnnnnnnnnnnnnnnnnnnnnnnnnnnnnnnnnnnnnnnnnnnnnnnnnnnnnnnnnnnnnnnnnnnnnnnnnnnnnnnnnnnnnnnnnnnnnnnnnnnnnnnnnnnnnnnnnnnnnnnnnnnnnnnnnnnnnnnnnnnnnnnnnnnnnnnnnnnnnnnnnnnnnnnnnnnnnnnnnnnnnnnnnnnnnnnnnnnnnnnnnnnnnnnnnnnnnnnnnnnnnnnnnnnnnnnnnnnnnnnnnnnnnnnnnnnnnnnnnnnnnnnnnnnnnnnnnnnnnnnnnnnnnnnnnnnnnnnnnnnnnnnnnnnnnnnnnnnnnnnnnnnnnnnnnnnnnnnnnnnnnnnnnnnnnnnnnnnnnnnnnnnnnnnnnnnnnnnnnnnnnnnnnnnnnnnnnnnnnnnnnnnnnnnnnnnnnnnnnnnnnnnnnnnnnnnnnnnnnnnnnnnnnnnnnnnnnnnnnnnnnnnnnnnnnnnnnnnnnnnnnnnnnnnnnnnnnnnnnnnnnnnnnnnnnnnnnnnnnnnnnnnnnnnnnnnnnnnnnnnnnnnnnnnnnnnnnnnnnnnnnnnnnnnnnnnnnnnnnnnnnnnnnnnnnnnnnnnnnnnnnnnnnnnnnnnnnnnnnnnnnnnnnnnnnnnnnnnnnnnnnnnnnnnnnnnnnnnnnnnnnnnnnnnnnnnnnnnnnnnnnnnnnnnnnnnnnnnnnnnnnnnnnnnnnnnnnnnnnnnnnnnnnnnnnnnnnnnnnnnnnnnnnnnnnnnnnnnnnnnnnnnnnnnnnnnnnnnnnnnnnnnnnnnnnnnnnnnnnnnnnnnnnnnnnnnnnnnnnnnnnnnnnnnnnnnnnnnnnnnnnnnnnnnnnnnnnnnnnnnnnnnnnnnnnnnnnnnnnnnnnnnnnnnnnnnnnnnnnnnnnnnnnnnnnnnnnnnnnnnnnnnnnnnnnnnnnnnnnnnnnnnnnnnnnnnnnnnnnnnnnnnnnnnnnnnnnnttttttttttttttagttggagtcttactctgtcaccgaggctggactgcagtggcaccgtgttggctcactgcaacctttgtttcctgggttcaaggaattctcttgcctcggcctcccgagtagctgggattacaggcacccaccaccacgcctggctagtttttatatttttggtagtgacggggttcaccatgttggccaggctggtctcgaactcctgacctcaggtgatccacctgcctcggcctcccaaagtgctgggattacaggagtgagccaccgcacccgggccatgcctggctaatttttaaaatttttgtagagatgagatcttgttgtgttgcccaggctggtctctaatgtcagggctcaagcaattctcccgcctcagccttccaaagtgctgggattacaggcatgagccaccatgcccagctatgccataaaatttcatgagtttttttttttttttcttttgcgacagggtcttactgtgtcatccaggctggagtgtagtagctcagtcatggctcgctgcagcctcaaccttttaggctcaagagatactcttgccttagcctcccaagtagccaggactacagatgtacatcatgactcctggctaattaaaaagcattttttttttttttttttctgtagagacaaggtctcattatgttgcccaggctggtcttgaactcctgaactcaagcaattttcctgcttgagcctcctaaagtgttgggattataggtgtgagccactgctcctggcctcatgatacatttagccattttatattttataaaatcttgattcttttaccctaaagctttgtttaatctaattagagaaccatgcttttatttcttttgccaggccactgttgagtatttgccaggtcactattgagtaggctaggatttcagtggagatacctcgccagagacaaaagtttagcttgggttgatcaatattctttaggcaatggtgtccagccagatgtaaatctgtttgattgtcctatcatctagcacagatggcaaatatatcatttaaactaaagatttatttatactttttttagaagaatcatttatctttacatctctgcttttaaaaattgatacttaataattatttgtgggatacatgtgctattttatttatttatttgagatggagtctcactgcgttgcccaggttggagtgcaatggcatgatctcagcttactgcagcctccgcctcctgggttcaagcgattctcctgcctcagcctccatagtagctgggactaccggtgcacgccactatacccggcgaatttttgtatttttagtagagacggggtttcaccatatcggccaggctggtctcgaactcctgacctcaagtgatccacctgctttggcctcccaaagtgttgggattacaggcatgagccaccatgcccagccacgtgtgttattttgatgcatgcaagtaatgtgtggtggtcaaatctgggtaattaggatatttatcacctcaaatatttatcttttgtgttagaaacatttgaaatcttctagctattttgaaatatacaacaaatgaatgttaactatagttgccctactctgctaacgctagaacttattccttttatttaactgtatgtttgtactcattaaccaaccagtcttcatatgtctcaccacccttccatgcttcccagcctctggtaaccatcattctactctgtacctacatgagatgaatttttttttaactcccacataggagtaaagacatgatatttttctttctttgcttggcttatttcatgtaacatcatgacctcctcttccatttctgttgttgcaaatggacgtggttgagtgatatttcattgtgtatatatgacacatttatattatccattattctgttgatggatacttacattgatccacatcttggctattgtgaatagcgctacagtaaacacgggtggcagctatctctgcactgaattcattaataaataaatgaatgctataaattctaaatgctgtagaattcacttataattttaatgcactgatttcctttcttttggatatgtacccagcagtgagattgctggatcatatggtagatctattgtagttttttcacgaacctttatactgttctccttagtggccttactaacttatgttcccagcagcagtgcgagcattctcctttctctgctttctcggcagtgtctttttgttgttttttttttttttttgagacggagtttttgctattgttgccctggctggagtgcaatgatgtgatcttggctcaccacaacctccgcctcctgggttcaagcgattctcctgccacagcctcctgagtatctgggattacaggcatgcgccaccacgcctggctaattttgtatttttcgtagagatggggtttctccatgttggtcagcctggtctcgaattcccaacctcaggtgatctgcccaccttggcctcccaaagtgctgggattacaggagtgagccaccacgcccggcccgtttttttttttttgtatttttaataatagccactttaactggagggagatgaaatctcattgtggttttcgtttgtgtttccctgatgatcagtgatattgagcacttttcatatacttgtcagccatttgtatatcttcttttgagaaatgtctgtttagatcatttgtcctttttttttctttttttttttttctagacagggccttgctctgttgcccaggctggaggacagtggtgcaatcctgactcactgcagcctcaacatcctgggcttgagtgatcctcctgcctcagcttcctgagtagctgggactacaagcatgctgcctccataccaggccaatttgtttatttatttttgtagctatggggtcacactatgttgcccaggatggtcttgaatgcctgggctcaagcagtcctcctatcttgacctcccagagtgggattacagatcactgcctgcccatttttaaattggatttttttcttcttttctttttgctgttgagttgtgtttcttatatagtttggctgttaatcaattgtcaaatgtatagtttgcatatattttctcccgttctgtaagttgtctctttactctgttgactgtttccttaaatttgcagaaactttttaattggatataatcccacttctctagttttgcttttttctctttttagattttacccaaaagaaaaatcttttttcagaccaatgttctgaagcatttccttggtgttttcttgtattcgtttcatggtttcagatcttaacatttaaatatttagtccattttggtttgattttggtatatggttagagatagggatctagtttcatttctctgcatgtagatatccagttttcccagcactgttgattgaggagactgtcctttctcctgtgtatattcttggcacccttaaaaaaatgaattggctataaataaatggatttgtttcttgattctctgttgtcttccattggtctatgtttttagtccagtatcatgctgttttggttactgtagctgtgcagcatattttgaagttaggtagtatcatgtctctatttttttattttttatttttattttttgagatgggatcttgctctctctcccaggctggagtgcagtgggcatatcttggcttttttgcttttctgctgctttgcttttgcttttctttctgcttttttgatgtaggtgtttattgcaataaactttcgttttactactgcttttgctgtgtcccatggattttagtattttgtgtttctactgtcatttatttcaggaaattttaaaattttcttcctcatttcttcattgatccattgttcattcaggaggatattgcctaatttccatgtatttgtacagatctatttccaaagatctttttgttactgatttctagtttcattgtatatcggtcagaaaagatacttggtatgattttatttcttttaaatttgctgagacttgttttgtggcctaagtggtctattttggagaacccgtgtgctgatgaagagaatgtgtattctgcagctgttggatgaaatgttctgtaaatgtctgttaggtgtctttcgtttaaaatgcagtttaaatccaacgtttggttatttattttctttctagatcatctgtccaatgctgagagtgggatatttaagttgaataatagttcaagtccccaactattattttattttagtctatctcaccctttagatcaaatagtacttgctatatatgtctgggggctcttttgttacgtgcatatgtatttataattgttatattttcttgctgaattgatccgtttatcatcatatggtataccttttctgtctgttttacagtttttgacttataacctgttttataaggcaggagtagtatagctactactcctggtttgtgtttgtgatgagtaactttttttgtctcttcacttttagtctatgtctgtctttttttttttttttttttttttttttgtgagttggagtctcactctgttgcccaggctgaagtgcaatggcataatctcggcttgctgcaacctccgcctcccgggttccagtgattctcctgcctgaacctcccaagtagctgggattaccggcacccaccaccatgcctggctaatttttggatttttagtagagatggggtttcaccatgttggccagcctcatctcaaactcctggcctcaggtgatctgcccaccttggccttccaaagtgctgggattacagacatgagccaccctgcccggccctatgtgtgtctttacggggaatttcctataggcaacatataggtgtgtaatgttttttaatccagccagtctatattttttaattgggaaatttaattcatttacattcatggttattattgatagataagtactaattcctatcattttgttaattgttttcttgttgttttgtatatcctttgttccttttttccctctccttgtttattatttcagtttgttggttttctgtagtgataagattcgattcttttttctttcttctttgtgtatctgatctatcagtgagttttatactttcccatgttttcatgattgtgattatcatcttttcacttacggtaaccaccccggcgaatactttactttttgtagaggcagggtcttgctgtgtttcccaggctggtctcgaactcctgggctcaagcgattctctcacctcgctcggcctctccaagtcctaggattaaaggcatgagccagtgtacctggattagttttcttttttaatacaacattgtattggaaaatatttttccaagttattacacagcagttataatcttcctaattctgtaggaacataataattaggaatttttaaagaactttcttcttagccatttaatctttttttcctgtttaatgcgtttgaattatttggtatggaaaagtaatgaaattttcttgattgttaagacagaaaggatttggttgtaagaagatttatgtatataaattattattatttttttctccagtagcatttatgaatgataactgaccatagttagaaatccagatttttgtatttgataaatttaaatacgagatgatagcatttagatattttcataatgttaggcattcttataatgtttagcttagaatttgccagtcatttggaaatacctaagtcagttgttctcaactggaggtgagtttacccccagagatatttagttatgtgtggagatgtttttgactgccacagctggtgagggttgaggagatggacagaggatgctgctgtcatttagtgggtagaggccaggtaagtatctaaacatccaagtgcatgcaacaatctcatgataaagaattatcctggccctaatggcagtagtgtcactgttgagaaacttgaatctagattttctcaaacgttaggcaaaattattaagattggttaatattattaatatttattcatctagccagtatttgttcaataccatctatggtactctactagatggtggtagaaaaacatatgaaagtaaaaaataatgaaaattgtagtgtttagaaatagagaaacaagatttaaaactgatcatttctgttaagatatgagagaaggtggaaggatcatttgagcctcagaggtcaaggctgcagtgagccattatcacaccactgcactccagcctggacaacaaagtgaaaacctgtctccattaaaaaataaaaatatctcttccagggacgttgtctacaggcactcagaatgatccagcatgtgacaataccatcatagacttccctacaatacagcctctaacaaaactaggctgtcatgagcccttggtaatagaattgtcgacctttataccaagaaggttgggaaagcaccgaaatctgcatgtggcgtgtgcccagggagacttagaggggtccatgctgtgaggcctacagttcctgtgagaagatgccattttaggtgatacctgaaccatgaaatgtattcagctgttcatggatgaagaggaagagcataaaccttcccaatagatattgcagagctccaaggccttaaggtgggagcctcctgatgattggtggctcagaaccgtgctgtccagtagagcatttccttttgagcacttgaaacgtggttaatgcaattaaggacctgaattttaaattttatttaattttcattaatttaaatgtgaatagctgcaagggcgtttgaaaatgcccttctagaggctgacaaaatctaggtcatgtaattttgtaagattttgataaagtatttgggttttatctgatgtatagaaggagctgttgaagagtttctactaagggaatgacataatatttaaatcatgaaaatactcatatttattagcagatgaattggagtttataggttacatggggagcagaatgttaagagcagctaagtggctctggaatctgaccaaatgaattcagatcctggcgcttccactagcagctgtgtgtgtcattgggtaagtttcttgcacctcagtttccttcctcatgagtaaaatggagataataatagtgctgatctccaaaggttcttaagaaggttaaatgagacaaatccatttaaacctcctagagcttgatacacagtcatcactcagatatgtaccagcagctgctgccaccatcagtaagtattctattcttacaactacaatgaagaaactattcataccgtttatttgatatgaaatctgaacaagcttagtgtggtgttagataaaacgcttatgactttcatttcaatagtgttgcttttttatttttaaaaaatattaaaggctaggcgtggtggctcacgcctgtaatcccagcactttgggatactgaggcgggcgggtcacgaggtcaggagatcgagaccatcctggctaacacagtgaaaccccgtctctactaaaatacaaacaattagccgggcgtggtggcaggtacctgtagtcccagctgctcaggaggctgaggcaggagaatggcgtgaacctgggaggcagcacttgcagtgagccgagatagcaccactgcactccagccttggcgacagagtgagactccatctcaaaataaataaataaataaataaaataaaaaaattaaatgtctttttctgtatagacatgggatctccctatgttgcccacactggcgtcaaactcctgggctcaaggaatccttgtaccttggcctcccaaagtgttgggattaccggcatgagccactgcacccagccagtggtgttgcttttcaaactttagtatttatcatcaatacttattatatatttgtcatcttggaatgtccaactttattaccttagaaaagtaaactcctttaataaactactagatgtacatgatacaaaacttaggaagttaagggataaaagacttgtagtataattatccatgtgttaaatatattttctcttttgacttaaccgttgccatattattagacccattgttcatttttaataatcccataggaagttgtttgtagaaataatataattttaatagtgttgcctaggtgtagttgtagattattgtcactttatgtttaaaagctacttctctctctctgtctttaacttatttgggaaaatagcatttgggaagtagctgtttaagtgcttttcttcttctttttttttcctctctctctttttttttttttgagacggagcctcgctctgtcacctaggctggagtgcagtggcgcaatcttgactcactgcaatctccgcctcctgggttcaagcgattctcctgcctcagcctcctgagtagctgggattacaggctcgcaccaccatgcctggctaatttttgtattttggtcaagctggtcttcaatgcctgacctcgtgatccaccttccttggcttcccaaagtgctgggatcacaggcgtgagccaccgtgcccggccgtgtaagtgcttttcaaatgccagtttttgcagatggtagtagtggatacagtttttatttatggaaccttctgtggagtgtcaggactgcactggaggattacatggagtggatgtgtttctctttggttttttggagacaggttctcaccctgttgtccaggctggagcatggtagcatgatcatagttcactgtaattaactttgaactcctgggctcaagcaatcttcctgcctcagcctcccaagtagctgggactacaggtgcatgtcgtcatgcccggctaattttgttttgtttcattttctgtagtgacaggatctcactatgttgcccaggctggtctagaactcctggcctcagatgatcctcctgccttagcctttcaaggttttgagattacaggcacgagccatgccacctggctaacatgtttcttatattagatcaatcatttattttggctactaaagctaatgtgaattttcaatttattctttatatctgatatgaattgcattagctaatgttgaaaatcagtcatttgcactgaagaacctattgtatgcagggtatgagggggtggtagcggttgtacctactctcaagaaatggaatgaaatataataaaatgaacttactagacaacaatatcaattagtccactttcaagttctttggaagtttctttttacacttacaaaaagattcagtctattattactagttaagaattattattgtgctgtcaagaatgtttatggaatgtcagtttacctttgatattctaaaactgccctctcttcagtttttgggtggttccaatttatattaattgacatatctgaaacttagcaaaaagaaggtagtttgttttttattttatgtttgcacatacatgtttggctcttaaaatgttagtaggttatatagttcttttcattaaggagttttaaaaaattaatagttaagaagaatgtagttatatctacaccatgaagtactacttaaacatttagaacaagaatgaagtaggtatgtttattgacttggaaagatctctaatgttttgataagtggagaggaaaacatgtcattgaatatttattattgtgttgttgctattatttttacacatttgtaagtgtatagaaaggtttgtaataatgtgcttcagagtattaatcattttgccatagggagtggagtgggatttgaagggtaaagagggcactactttttcttttttttaacaaaaatcatgtttatacattattgtagcaattagagaaagtaagcatcaaactttttttttccacagtcttagttgccactgcctgatatgcaaattggtaataattctatcctgattcaatcactagatgcaaatggttttccacagtggccttaaaattttcctagattattgaaaaataatattgtattagcagtaataagttgtggcttgccgttttcctttgtggtcttaaatttatttttccaaaattttaatataggacagttagctgagttcaagtcttgcattactttgaaagatcatctttgactgaattctataatgatttataagataaccatgattgagtatatttcatttctctattcttcctgtgctcaccttttacgtaaaacaacaaaaaaaatctcattcttacccatgattagctcatcctcttttctttcgacaaacctcacagtcagtgtcatcaaatatttgtgaaatccagatgctgctgctgctttcctaccccctcctctcccccggtaaaaattcctacgagttagactcagtcttttttctgtttggcctttctttctaaatagagaacagcctttcctgttgtgacagcctaaaatgtgtttgaagttacttttctgtgttttcctaagtacaaaataactgaaagatcctctggcctcttggagcttgcttttccaggggactaaacattggagatgttgcagagcttttaagaatattgagataaacttaatttagaaaacatatattgaatgagagctatatgcaaggttttgtgcctggtaatgtgagaaagcagtggtggacactatgatccttgtctttaagagtgctcattttaccaggcaagatggtgatacgttgttttaagtacatgtgggaatgtgaggaagagacattaatgattatgtaaatgagaacaaaaatatgtaaataagtagtaacatttactggtatagtttttctgggttctcattaagcaaaagtacttggaggagtgaagcatggttaaacagagaaagatggtatctagatgaactctaagaagccataaaatgtaggtgggcagcaagtttggactgcatcttacaagatattggaatgagtgtacatacatcagttaaagcctttgaggtggaggataaggttacagctacatagtgtaatgagccatgaaatagataacaaaaattgaccaaacctaggcagaggagttaactggtgaaaaactcaacagaacagtttatacaggttgagcatctctaatcaaaacattcaaaatctgatatgttctaaaacctgaaactttttgtgtaccagcattattctcaaaggaaatgctcaatggagcagttcagattttggattttcagattgggggtgctgaactggtaactgtttgcgggtgttccaaaatctgaaatctgaaacatttctggttccaaatttttcagatagggatactcaatctgtagaacattttctttattactataagtaacacttactgtgtaacagttacttttctaagcattttatgtgtattaactcaatccttatgacaactgtatgaggtaggtataattacattccccattgttagttggcaaatagacacagaggtgacgtatcctgcccaaagttatccaggtagtgtgtggtagaggttggatttgaactttggtggatcttttaacatttattgagtgactacagtgtcccagacactgtgctaaatgctttacattcatgatattatttaatacttatgacaacctttatttacaacaaaggaaaatgggacttggagacatgtaatttgaatacaggtctgttttgaatctacaagttcatgtgaagtattctgtttttttttttttttttttttttttaaagacagagtttcactctgtcgcccagactggagtgcaggtgcagtggtacgatctcggctcactgcaacctccacctcctaggttcaagcgatactcatgcctcagcctcccgagtagctgggattacaggtgccttatgcccggctaattttttgtatttttagtagagacaggtttcaccatgttggccaggctggtcttgaactcctgacctcaggtgatacacccacctcggcctcccaaagtgctgggattatgagcatgagccactgtgcccggacccttctttttgttaagatcacaaataaggtcaaaagcaatactcaatttttgggggattagggcccttttgaaaatctgatgaaaggtatgaatctactttgcagaacagtaaacatacaaacataggggttttctttttttattttattttttgtttatttatttattttttttgagatggagtctcgctctgtcactcaggctggagtgcagtggcgtgagccactgtgcctggcctctttttttattttttaactgcagttttaagagagttcaataactctcactgataagattccttattctagtctagacagattttccccttgcagtggtgctgtgttgcactttgaacctgattcctaggatttggaaatagctcaacttcgactttacggtgtattaaatggagaggtatcttattaagattttatttacccttctattttgaagtatttttcttaaaaagcatttatacatgtggtactcagttgtattctggttattaaaaattttatgtctttttctacccatcatggtatctgcttgctgattaataacatttatgaaagttaggattccttgttgttaatatttaatgtgaatttgctcattaaatgttaaatcagataccttgttaaaatattatttaataaaagccagacgtggtggctcatgcctgtaatcctagcactttaggaggctatggtgggcagatcacctgaggttgggagttcgagaccagcctggccaacacggtgaaaacccgtctctactaaaaatacaaaaattagccaggcatggtggtgggcacctgtaatcccagctgttcgggaggctgaggcaggagaatcccttaaaccccagaagcagaggttgcagttagccaagatcatgccattgcaatccaccctaggtgataagaatgaaactccgtctcaaaaaaaaaaaaaaaaaagaaaagaaaaaaattacttaatatgtatttacctgattacttttcttcaaaagaaggattaaccttaaagatacaagggtatgttattttgttaaatgccagttataaatgtcttttgaatttctgggataagaaaacagtagaaataataataaagttctttaatgtttgaaaactgaaaatgtgtttctttgaactgtgggatattcccttcacagcaattttacaaagtatatgtactgtttttaaaaataaaacaactgatatggaccacgtttaactaaaatgagtcataggaaattagattttaataactagttgtgtggtaaatggagttttaattattttaaggaaaaggaaagaaagaccattagtatctccaggcatggatttattattgccatgaagttgttgtcatgaatagaacgatcagtttttactgtaaactttgatagacactggagcatttaacttcaactttatacagttccctttttatcttttaaaagcacatctggctgtcgggaattctgtaggcaagaaattgtgaaggattagaaactgttctttgtgcatttaaactgtcattctgtggttgcttaattgccatatagaatgcagaatactagattagaaaggtgtttagtttctttagctgttacagatcccaaagaacttttgactatgttaatttcttatggctataacatttctatgttaattttttacatatctaatgtaaaatcaatggtatattgttattctttgttcaataagcatttgtttagtaactttattttttttaatgtttttatattttttacttttttttttttcctccaggagtggactgagtctgatgaggctgcagggcctggcccctcatccctccccctcccgccataactctttaaaaaattcagaaaaatcaattaggatgaggtgtcaagtatttagttatttgttattattaattttcttttgagacagagtctcgctctgttgcccagtggtatgatcatggctcactgcagccttgacctcctgggctcagttggccctctcccacttcagcctcttgagtagccacaacctctggctaatttttgtatttttattagagacagggttttgccatgtttcctaggctggtcaagtatttattttaaacttgcttaaaggattagactttgcaaaccacagctttaggtttattgtaacactctcacccccatttgtataaatgaaaatcaagcaggaatcatttcaccccaaaactgtcttacacttactggcttaatattaggattttaaaccaacagtttaaatatttgtaaataattaaacacactttttatatactaggcattatgataaatattatcttaatgtgttgaataaatcagcatgataagtccttacttttcacttttacagaagaggaaactaaacttaagtaatttgcttatatagtttctgtatagtagagccagaattcaaacttaggtctctgacaccaaaacccattctcatttttttctttttttcttccccccgccgccccaccactgttttttttttaagatagagtttcagtctgtctcccaggctggagtgcagtagcatgatcatagcttgctgcaacttctgggcttaatccttctctcccagcctccctagagctaggactacaagtgcacaccaccatgctaaatttttttttttttttttttttggtagaaacaaccccatgctcttttattgatgctgtttagcctacttggatgccttgaatctgtttaccttctgtttatgttccttctttcaagtttgtgtttggaaagtgataattcgtgactcagcctcagaatggaggcatatatcacacatcttacatgatttggatctgtgtcagaggaacttaatattgtggttttgataatataattgaatttatgcttatagttgaatactaaaatctgagatttattaataccttggaattaaaatagaattcacttaccttggatcagttaaataactagttgattagcaactgactgaagatcaacaggaaaatagtaaggcattagttttaaaaaattaagttgtaagttggtaaatgactaattccattgcagtcactgaatgtatatcagtaatctccagactcgcatacaaccttgtcttggtggaaagctctgactatggattttgaacataagaaagagaatgtgagtgtctgttaaaagccatcactcctcagatgatgttaaaagtcttcactccacatcttctgaggagttgtcaagtgttcctgcttctgaccacaaggacagcaattggcctgtaatatatgtattccttgaaaaagtaaggagttaatttgttatgcttgtgtagactgttactaattttgtgtagttttactaaatgattggatttagtagaatagacaaaccttaccactctttttttttattcaagacagtcattcctaactgatcaaggttttgctgttgaactgggaaaggaccttggaatcataatatagtgctacacgattctattagcagtgaaagaaataaaaatgtttttactatcttggcttcctccctttacgctgtaaagcagccctggctacctgatgtcttcatgagttgatattctaaataattttaccctcaaatagccatataatagtaagatttggttgaattagtaacagagaaaatatttatagttaaacatctgagtggccacttgtctgcaagtactgtcataagtactcattaaatcctattcctgtccacaaggattgcaagggcgcaaacagatgataagaatcagtgatcactcactgattgtgtccttgcagtctctgggtggctgcagggcacaaaggatagcatgaacctcgccattggctgcagggcacaaaggatagcatgaacctcgccatcctcaactacatcattggcttaagcaggattttataagacagtctggatacctcactgccaagttccaaatagcagattttgctcactataaaattaatgtgtctgctagaaaaatggaaacacagagaaaagtatgacaggaggctgggcatggtggctcatgcctgtaatcccagcactttgggaggctgaggcaggtgaatcacttgaggtcaggtcaggagttgcagaccagcctggccaaggtggcaaaaccccatctgtgataaaaataccaaaaaaaaaaaaaaaaattagctgggtgtgatggcatgcgcctgtaatcccagctacttgggaggccgaggcaggagaattgcttgaacccgggaggcggaggttgcagtgagccaagattgcaccactgcactccagtctgggcaacagagtgagactgcgtccccccccccaacacccccccccccaaaatgaaaagtatgacaggaaaaacatccgtgatgttgttaacaaaagactcacaccacccattttaacgtgatccttcaagttgttttgctgtgcacttaaaaaaaaaagttattagtgcaccaccgatttctgtcctgctttctttacttaaaattataccataagcaacttctcatttttaaaacacatttttctaaatatatattttaagaatgtatttacttgttctctaatgagttagtattttttactcttacagtgttcaaacaactgtcacatagtttcttggcatccataaattttctattttttttaacgctctctcagcagaatcaatattcttttcaaaatactgcctctaacttttgatctgaacccttgttgttctcaaagtgtaagtcaggtgccaccaaacccttccagattcttctcagacctggttacttttgatttttcagcagtactttaaatacatctcctattagccgggcgtcgtagcatgtgcctgtagtcccagctattcaggaggctgaggtgagaggattgattgagcttgggaggtggaggcgccactgagttgtgattgtgccactgcattctagcttgggtgacaaagtgagacccagcctcaaaaaaattaaaaaaataaatatatattctatggtatttatcacataattcatttatgatgacagagtaggtgaaattaggaatcatatcaaactggtttggattgctgtgtggtatcctgcctatcctttatattctgtcccagcatcagcagacccattatttaaaatatatatatattggctgggcaccgtggctcacgcctgtaatcctagcactttgggaggccaaggtgggcagatcatctgaggtcaggagttcaagaccagcctggctaacatggtaaaaccctgtttctactaaaaatagaaaaaattagccaggcgtggtggcacgcacctgtaatcccagctacttgggaggctgaggcaggagaatcgcttgaacccgggaggcagtggttgcagtgagccaagattgcaccgttgcactccagcttgggcaacgagtaaaactccatctcaaaaaaataggtatatctatatctgtatctatatctatatctgtggatatatctactgcttacgtcttctccgtggtgctagatccatatcaatcctgagactactgacattggtttgattgttccttagtcaccttttgcctatattttgaaattctgagattctgactttgatttaattttagtttaggatattactgatttattctctgatgatcttgtttattttcttttagaattataagcagaggctaggagtagtggctcatgcctgtaatcccagtactttgggaggctgaggtgggaggattgcttgagcccaggagtttgaagccagcctgggcaacatagtgaggccctgtctcaccaaaaaataaaacaaattagcccagtgtagtggcacacacatgtagttttaactacttgggaggctgaaacgagaggattgcttgagccctggagtttgaggttgcagtgggctatgatcgcactactatgcttcagcctgagtgacagagcaagaccctgcctcagaaacaaacaaacaaaaagcaagcagagagactgggtgcggtggctcacgcctgtaatctcagcactttgggagtccaaggtggatggatcacttgaggtcaggtatttgagaccagcctggccaacatggtgaaatcttgtcctattaaaaatacaaaaattagccaggcatggtggcatgtgcctgtagtcccagctacttgggaggctaaggcaggagaattgcttgaaaccaggaggtgaaggttacagtgagccgagatcgcgccactgtactgcagcctgggtgacagagtgagactctgtctcaaaaaagaaaaaaaaaaaaaaaaacaagcagagaaataaaccatattgattacataatgagagtgagcacaaccttgagtatgtaacaattgacattgacaaaattgatccagaaataaattttagctttgccttttgccatcttcctctcataagtttcagactttttcatctgaaatttgctagttttgataattagcttagatgctatgtggaatgttggtaatgaacctacctctagatttacttgcttggccctgactgctctcctgagcttagattcatgtattcaacacactacttattatttccatttgaatctctgataggcatctaaaactacttgtggttatccctttccctttgtctattctgcctctaatcctgtctcacagtaataacaggttgaacatcccgatccaaaaatatacaatgcttcacaatctgaatgttttggagtgccaacatgatgctcaaggaaaatgatcattagagcatttggattttggatttttggattagggctgctgaagtggtacagtgcatatattcaaaaattaaaaaaaaaacctgaaatacttctggtaccaagcattttggattaggaatactttcccttcttcccacctaatctttcaagccataaacttaaaatccatccctgatatccataatctatcactttcaagtatactatataatttatttaagtattatggctgttagtatttcagctagaccataaactccaggaatgcagggattttagtctcttttactgatgtattccatgcacctagtacaatgcttggtataaagttctcaataaatatatgttaaatgaatgaatgaatcaatcagtctacattcctttctgttccacctgctcaaacaaagtatcttgttactaccgtgttctaagccaccattagttgtggccaagatgattgcagtagctttgttttttttttttttttttttttcttaagagacaggatcttgctgtgttgaccaggctgtgatgcagtggcttttcacaggcatgatcatggtgccttacagcgccgaactgttgggcctcttgccttacgctcccaagtagctgggactgcagatgtgagccactgtggcctggcatgatagcttttaactaatctctgcttctattcttgtactcttcagttcttattcttacaaagcaaccaaaatgatctttggaaaacattcgatcttttcacactcctgcttttaaaacttccagtaggttcccagtcatgttagaataaaaccctaagtccttaccatgccaacaaggacttaaatgtgtgttgttttaagctgttaagtttgtgatttgtctcttgattaattcagataactgataaattacctagccagatcagtgttaccctattatattcactggcaccccttattcttcagaggagggaattattcagggtgtgtacaccaagtacaggaatactgagagccatcttagatttgagtccaccctggctggatgcagtgacgcacgcctgtaatttcagcactttggagggccaaggcaggcggaccccttgagcctagaagtttaagaccagcctgggcaccatggtgaaatcttgtctctacaaaaaataaaaaattagccgggcatggtagtgcatgcctgtagtcccagctactcaggaggctgaagtgggaggatcacttgagcctgggaggtaggtggaacctgcagtgagccgagatcgggccactatacacctgcctaggtgatacagaccctgtcttaataaaaagagtttgccctgtggccctcaaggattcacatagggtccactttcgttaacctttgatacctagacatttttggaagtgcttctttcttattcgtttattttttcatttgttagcattgttactgaccctccaattttaacaacattttcttgtttctattggatagttactaaataagaaaagcaaccctcagaattaaacccagtgctgacaaagtccatagtagaacatacatggtatgtgtttgcttgagtttttaagtattacttgaatcatataaaattatttttcttttttaaggttaaaatatacttgaatatctgtaaatctggaatttcatgtaattcaacctattaagtataggtaagagtagagcaaggaggaatgccattttctttttctttctctttttttcttggtggttggggattggcaatgatattaacagaattcaaatggtgtcatgtataagtaaaacttccttcctcatatccactgtagtgctccttttagttgagcagaccagcttttatttagttctcaatatctgtagatttggggaaataaatgacctgaaggaagaactaggatgatacaaaatattaatgaagggaaaaatacttgacttatctattctgctgcttgaggagcataaagtatagaaattacccacataagaaaagctttgggatctttcaaaactacccagaattgaactttgttatttctgtgtatgagttgcagctgctgaaatgttttgagatgacctcactaaataaactttatcttgggatttagaaaataagggatgtcacacatataaaccatgtgccttttacctttataggaatcatttgttgctgaaaaattaatttacttgataggaatcctggagtttcctgttattcttttagtaactgattaattactatactttttaaagcagtatgttttcattcatattatataaaatatatagaataaaaacagtggtttgtgtgtgtgttatatttaacaatatatctattcagtcaatgcctgtttgtgtagaatccagtcacaagtctatatctgagtatttatagaaagtttggccaggtgtggtggctcatacctataatcctggcactttgggaagcggaggtaggaggatcacttgagtttcagagtttgagaccagcctgggcaacacagtgagaacttgtctctacaaaaaaaaaaaaaaaaaaaaaaaaaaaaaagagagagagagagaagaagaagaaaaattactgggcatggtggcatgtacgtgtagtcccagctactgtggaggctgaggtgggtggattacttaagcctgggagatggaggctgcaatgagctgtgatcacaccaatgcaccccagcctgggcaacacagtgagacccgatttcattaaaaaaaaaatgaaaaagcaagtttatatttgatgatgatcatgagatacccctagagccatgtccacactctggctgcctgtgtttttaatataccaatatatggtttatttggcttgtagtgtgtatgggaagtcaggacaatttcatgcagaaagccttatttttggttactcttgaaaattttgaagaagtagcactgcttatctggaattcctgcatgccagtacttgactacaggagagtatctcagtatctgctgccctctggggagtggccattctcttatcgttttccatagtccctaatctctgttgtttacatctggccagttttttcccattttgtttcctccagggggtatttctcttgctctggagtcatgtaagaatgatcatgttaaggaaactttgttttccatattttatttattatttgaaaattgtggtttatgtatgatagctcttaattggccagaatataatcaaatccaataagttagtgctagataaataaactttatacctaatgactaatcctaatttgcatgatctttatggtctaccttaaatttttaaaaaactctgtcaagttaatattggtcaccaaccaccaaatatcattaattttataggagattattttttggtggaaatcttgaatgaaaattcactagctacctgaagtttccactgagtcaaaattttagagcttttctttcttgcagcagtatttctttttaaattttctttcttctatgcagagtaacagtataataccaatgtaagtgatattttatcacaggtgttagtagtttgcttgtttttgtctttaatcttgtttttgaggtaggtggtgtggaagaggattaaaatacacgttcatataagtacataaaacttaaaggtagagtttaacaaataattttaaagcaaaaaaaaaattttaaaccagctttaaaaaaatcacatgccctttctgtcataatttcctctctccccagaaataatactatctgccttttaaaagtcattttcctgcttctctttatagtgttgctaaacatgtgtacatctattgactaatacggtcaagttttgccggttttggatatttggataaatggaatcatactttatatattcttcttaatcttttactcagtaccatttgtgagggtcatctaaattgtgttatggtagttttttattctgtttctgtataggaaaattttcagtgtatgaaaatttcattattgatcaattctgttaatgaacagttgggttgtttccaatttttggttattaaaacaatacaactatgaacatttttgttcatgtaccctggtgcacgttttcattgttttcaaccagaggtatacctaggagtggaatggctgggtcatagggcatgactgtttccaagcttaccagctactgccaaattgcttcccaaagtggttgtaccagtttacatttctaccagcaagagaatgagaattttggaagccccacattgttaccaatgcaaaaatataatatctgtaagaagcaaaaatgtttctcgggcatattttcttttaaatgcaataagcagtacacacaaacatatattgcactacaagaaatggttgatgtattttgcttaggattaatattatagaaaagacaacagtctgtttagctttggaggtagttaagtagttgctgttttcagctgttctacacctctgctccctcccagccttcataattgagaaggtagcaatatctttcaaataatgggaaaacgtacttgttttctttgtatgagaacttgttgctactccctttaaagaagatggatttcaacagtatgacctgaaattgaacagtttaccaagagagaagaacccttagctagataatagaggattcagtaatcattaatttaggaatattttgcaagaggtatttaaattttagtgtaaatttgatttttatctatgacaattttattagcctttgtgccatttctttgggataggattgtgctatttctgttctgtataatttctagtaaaagatggtatacctttttccctggcagagacattaagccctgtaacaaatacactaaaagcgaatatggaatgcctaatgcagtgtgacatatgtaatagaggatcttatttgaattgaatagagcacagtgaagctgagagatttttattatatgtaacagcctgtttctaggaagaatttcttagaaattctagttcttctattattttgatacagacttattttctttggcctgcttttattagtagacatccccaaatttaggaggaagtgcctttttagaatatctgataccaaaggattaccagtttggcagaactatttagagttgcaaaggatgcataccatagggatatacccctgaaagttgtttttcattggtgtttcctttaaggaagctttttatgtagaaagaacagcactttaggctttggcacaatgctttttctctttctctcaaacatttgtgttttatggggcaatataatagttttctgacaaaccaatggatactaattttatgtgtaataatttaaattgttctttcagtattctttagtatatgtcagtacctctttacagttctgtaagaaacatagcttacagtctttacaactctgcagatgtatttttcctttattattcctaattatttcatatatttctgttgatactagtgtacaggtttatattttttatgtatttagttcagttgtgttacttcattttctcattggttgctatttctacctgtttttgccatcatatgaaatgcactggatatatctttaagttcctaatttttgaggtgagattttctttagggtatgtactctaaagtgaaataattttggggtgatggttttgaagcacttggtgacacattgctctgtaatcctgggaagatagtaaagtaacccattcacagtattttatctgtgtcctgtttccttagatccctgccaataatggggcaaagattttattttaacttacttttgttagtttaattgataaacatacaatgtattttaatattttttatcaatagtattttaaaaatttactatgatttaattgtcatgggcaaatttggtatttaatttttatcagaataaatcataaaactggtctaagatagattttatatagttaacttctttgctctctttttattttcactttatttcactgtacagaatttttcccgtgttaaaaatgtgtattcatattgaggtttttactttagcaaaatatcaaaataattaattctaaaacatgggaaataatataaattcataagctttgttgtaagaaattttcttataagagctcttcatttctgattattaattttctaaagtagatgtttaaatagcaatccaacttttctcctttgaaaaatttccttggtgagatttatatatgctgttacatttcatggtaaactttatgcctttataaatgtaatagtcactcaaaattggaaacaaaattttcccaagaaaatcataatcaaagttatttaaaaaacaaggatgaaactagatacaattattttaagtgttaatctttggtcatatggtagcatcatttatgtgtcttttaactcgtaagcttttggttctagttagttctgtgtgagtccatttgatttcagtattgggatcaggtagctgatcctgaagatgtttatatctgtttagagagttataagtgatttgaaggttagagtaccagggactagattttcttcagaccttttgactgagtgaattccaggccattttcctttttccctgagcagagtttttaactttatgataaaattcagaagacctatgaactgaaaatagagaatatgtctaatgatgaattttagcatttctttgcattatgaatatagacaacaattgccattagttattatttttaacgcaccactgaagaacatatattactatgtcaggaatttgtttttgtttttttctttttcttttctttttttttttattgatcattcttgggtgtttctcgcagagggggatttggcagggtcacaggacaatagtggagggaaggtcagcagataaacaagtgaacaaaggtctctggttttcctaggcagaggaccctgcggccttccgcagtgtttgtgtccctgggtacttgagattagggagtggtgatgactcttaacgggcatgctgccttcaagcatctgtttaacaaagcacatcttgcaccacccttaatccattcaaccctgagtggacacagcacatgtttcagagagcacagggttgggggtaaggtcacagatcaacaggatcccaaggcagaagaatttttcttagtacagaacaaaataaaaagtctcccatgtctacctctttctacacagacatggcaaccatccgatttctcaatcttttccccacctttcccccctttctattccacaaaaccgccattgtcatcgtggcccgttctcaatgagctgttgagtacacctcccagacggggtggtggccgggcagaggggctcctcacttcccagtaggggcggccgggcagaggcgcccctcacctcgcagacggggcggctggccgggcggggggctgacccccccacctccctcccggatggggcggctggccgggcagaggggctcctctcttcccagtaggggcggccgggcagaggtgcccctcacctcccggatggggcggctggccgggcgggggctgaccccccaacatccttcccggacggggcggctggctgggcagagggcctcctcacttcccagtaggggcggccgggcagaggcgcccctcacctcccggacggggcgggtggccgggcggggggctgaccccccaacctccctcccggacagggcggctggccgggcggggggctgacccccccacctccttccggacggggcggctggccgggcagagggactcctcacttcccagtaggggcggccgggcagaggcgcccctcacctcccggacggggcggctggccggggggtgggctaacccccccacctcccttccagacggggcggctgtccgggcggggggctgacccccacctccctcccagacggggtggctgctgggcggagacgctcctcacttcccagacggagtggctgccgggcggaggggctcctcacttctcagacggggcggttgccaggcagagggtctcctcacttctcagacggggcggccgggcagagacgctcctcacatcccagacggggtggcagggcagaggtgctccccacatctcagacgatgggcggcctggcagagacgctcctcacttcctagatgggatggcggccgggcagagacgctcctcactttccagactgggcagccaggcagagaggctcctcacatcccagacgatgggcggccaggcagagacgctcctcacttcccagacggggtggcggccgggcagaggctgcaatctcggcactttgcggggccaaggcaggcagctgggaggtggaggttgtagcgagccgagatcacgccactgcactccagcctgggcaccattgagcactgagtgaacgagactccgtctgccatcccggcacctcgggaggccgaggctggcggatcactcgcggttaggagctggagaccagcccggccaacacagcgaaaccccgtctccaccaaaaaaatacgagaaccagtcaggcgtggcggcgcgcgcctgcaatcgcaggcactcggcaggctgaggcaggagaatcaggcagggaggttgcagtgagccgagatggcagcagtacagtccagctttggctcggcatcagggggagaccgtggaaagagagggagagggagaccgtggggagagggagagggagagggagaggagggagagggagaggagggagctaggaatttgttttaatatttttatacctgtatttcaatatagatcatttgttgtcataatcctatgtattttatgtatttaataacacgattctgagaagtctgtattttatgctagattggcaaagggtttgtgttcctctcaaatttaagaactattccttaaggagaatgacttctttcattttagcagaggacagaactgcccataattcatgaaagtttgcaaaaccatcagtgttaagtctgcattagtgtatgagagggaagagctggctaggattgattggtagacacttccactaggggtctgagtaaagtggtttcatatccgtaatgggctgatgagcaatttattgcctgcaaaaaacggagaaaatgaaatttttggttacgtaaaaacatgctgattatttttcagttgtataaatttgtgattattgtattatattagaaaatataaatgagaaaataaatacctgtaatgctttctgttaagattttggtatatctctttacagatctttaaaaatattacatatacatgtttttagatgtatgtgtgtgtattatatgcatacgtaaacaaataatgtatatagaaatattcctacacatgtgtatgtatatgtatatttagatgtcctttttaaaaatttttttgtatttaaagagatagggttttcctctgtcactcaggttgtagtacagtggtgtgatcatagctcactgtaagccttgaactcctgggcccaagcagtccttttgcctcagcttcccaagtaactatttctacaggtggatgccaccatgcctagctaatgaaaaaaaaatttttttttataaaatacagttgaagtcttgctatgttgcacaggctggtctgaaacttctgttcttaagcagtcttcctgtgttggcctcccaaagtgctgggattacaggcataagccacagcatctggccagatatatgtttttaaagacaaaaatgagattatgtcgtataagtaacttgccatttttggagtttagatttattgagatgtaatttagtaaaattcaccctttttagtgtatacgtccataagtcttgacaagcagagacattcaattctcactataagcatgatacagaacagttctgtcaccctcaaaaatctccttgttcctcttctgtagtcatctccttcctctttcaaccatttatttcttttctgttccttttacaaaatggtatcatacagtttgtagtttgaagtattgtttctttcctgtagcatgtgttttcctttatgatttttggttttgagatcatgcttcaagaatcttttatcaaattgatgagaatattcatgtatatatttttaaagaattctgtttttttcaattttaaaaattttaagtgtttgttcagtctcgtgcttattttagtgtaagttgtgaggtaggaaatccaattaaaaatcagatagttcagctgtatttattaagattgatttactaatataatgttcttactaaatattgatttcctcacaggtaacacaagtggcaagacagccgggaacccctaccccatccccttattcagcacatgaaataaacaaggggcatccaaatcttgcggcaacgcccccgggacatgcatcgtcccctggactctctcaagtaagataaaccttttttaaaaaaataagaaatgtccctgtaaaagcatcatttttgtttttctaaagagactcctaagcagtaacataaaacattacttgtatagtaatttcaagtttgtctttggcatcttttcagacttaaccgttcataaagatggctactaacaaatttcacacatttcattttgaagtcattaaaaattaactgttggtgatatttagttttcattttcattgtttaagaagttagagttttattctaaagtttactggaaaacccccccacaaagcactgatttgcttttcgatgcttaatctgctaccgtctcgcacccctttcgggtgaagcattaatggttattttctacttatgtgaaaacttggtgtcttcccctcttgagtagcatcagtgggattttttgtttgttggtttggttgttttctaagtcgattattgtaatttgataggcttaagtttttgttgaactgttagaagaattgtgaactccttagtgtatttctacttaatagtaacaacagacgttcagacactgtttaaggaggatgttcctatgtgttccttgcacttaagctgtttgccaagatatattgtttagcttgcaccgacctactgttgcaagcttgtttggatttccttgtggttaaaagttggctagagttataaagtcccttacagaatgtggactgagtcaagccaataacgttgatctaactgtgtgagattatcagtatttacatgtaacagctactcttttgataatgaaaatcatttttataacattatttgtgattttagcctccatattttaggccttttagagattgaataataggagagatcaggaattactaaaaataatgctaaaggtggtgattataagttaagggctgattttattttttattcttcattattttttagggacaatttttattccttattatttttttaaagacagggtcttgctccgtggccaaggctggggtacagtggcatgatcatagctcactgtaacctctaactcctgggctcaagtgatcttcttgcctcagcttcccagttagctgagaccacaggctcatgccaccatgcccggctaatttttttcttttggttaaattttttgtagagatggggtcttgctatgttgctcagattggccttgatctcctggccatgtgctgattaattatattttagactatagaatgtttggaaaaggaatgtacagtttgccaaaccatgactgaaatagccctattaatgaatataagtttgtcaagaacttagtgctatacctaaacttagtctaaatcattcctatataatttggagttttaaacattgaaaacaaaacaaaatgagctcctgattgtttaaatgaggttcctgtgttgggtttcttagactgaacacaacctctcaacttactattaaggtgtattaatctgagtctaatcaggagagaaaaactatgcactctcaagaatataagatataaagagcaaacgcttaccttagggctgagtagaggctcagatagggagcctttctctgtagggttgagccaaaggctgtggtagaagagccactgtggtgctgttcagaacttgctgaaactctttgttctggaacttgctggaaatgtgccctatgaagtattggggaaagctttcttctccagcaccaatctcttatagccaagagctgatgcagggcacaatggctaaaaggctccttactgcatatctgtttcccacagacaattcaaaacattagatccactggatcagaagtcccaagtggtagagcagcttgcactgcccatcccaaatttgctgtataaccttcgtatattgtgttccctactcaaaattggaaacttcctaggtgactctgtagtcggttaaggtggcacattcagatgtagtatatatgttgcctctacatccaaaaaaggcctaccaaacctacgtcttattttttgtggtagttttaggtgagagactgctacccctaccctgggctaagatcttgaccttgttggagagggcacggtgtggctttctgaatgggagtggtgccatttcagtggaagttactgaaaatccaccctcagaacttgtgagaattctgccctctagggtgccgagggaaagctgttcgcagggaggtttcttagaaaagccactgtgctgcgtgtcttcctgagggaataccaggggtagctcttggctgctgggtactgttgcttgctgtgcactgaagcagaaatcttgctctgatgaagctatgtccatgaggggagctagtcactagagaagccatcttttggagaagctatctgggctgcaggagcaaccaggaaccaggaaccaggaaccagggagcaaaaccctttccttctacatatctctagagccttctactgacaaaacttaatgttgtgtcagctgaaatgttaaaatatttatagagctcagatccattttcttattacaggcaaacagtgaattttgatatgaaagacaagcagttgataactggcatgtaagggaaatagcttagttttccatttgaaattcttactgtttcaagttgtgatttgacccaagcagttggcccaaaggacttaagttttctgaaagataggctgctcgcaaatgcatagtttgcatttaagaaaagatggtctcctagcatctcacttgttaaatcctcaagtgctgttctatatgccattttaccaggtgcctttagaaaccagagtacatgaataccagggagaatggccaccaaatattgtgttgcattcttttgtggtctgttttgccaccattttgcctaatctaatgaatgaacccagtaaatcacacctggttcaatgcccttttttcccctccatcctttcagacagagggaagcctctatggattcatctgtctcctagcaatatgttaacacttgttgatatggtgaggaagtttttctaaactagcatacctggaaaaatgaagagttccatgggaaactcaagttttttttaggtttcacagttgaaacagtttgtaggggcagatgcaaagcttcccttctgcccactctgagggtttgctgaaatgctgatgatagattaataggagaaaaaggcatacagatttatcaatgtgcgtggacacatgagagtcctacacatatgaaacacgaagaagggagagaaggttgagggcttgagtaccctcttcatagggaagagggaagcagggtggggaatgggctatcgggagttttagaggggaagtaaatggtttttaggtgaaatgaatgagtccaaattacaatagtcttagacaaagttcctctgagctcctgggaggtggcgggaaggtgaggaatgagacttcagtgtgaacaaaggttgtcttattatgaaggttaaatctcctaagagttacccccaaaagtaaaatgaaaagtctgtcttgatgtggtgatggctttagtctcttctgttttccatgattaatcttttgtgattatttgatgagcttccatgggagggtggtcttaagacaattgtgtttcttttggaaagacattttcttagtcatatctctgtgccccaccaagttcatggatggtaatggaaagaagagcgttcaaaatagaggggaagggattataggcttgaagtcaaaccataggttctagggctggctttgttactttctggttatatgatattggataaattatttaatatctctggaacttcgtttcttcatctgtcatatagggggaaattagaattctactgccctgtaagagcgttgttatgatggttgtgtaaattcctgcctcagaacaggatttcctaaatttagtaagtgcatttattatttgtattcctgccagacttggttctcctcaagatttatatatatgtatgtgtgtgtgtgcatgtatccttgcctgctaattcttttatttggctacctgtcgagatttagtgtgaaacttagaagctatctccaagagtttgaaatgtcttccatgtcttttctgatgttcggataaaagtaggatattaggcttggttattttctgttggcggtaatttgttttattcttctatacaaaacagattcagtcaactgaggataagatcaaagaaactattttttagctacatgtcctttttgatgtgacagtctccccttcttctgtgaattaaatctttttgtccaaagtaactacctatgtctgtgactcaatgtttgaccctcaatctactaaggtctaagtgaaagaagctaagctgaagaaaagtgaacttcataactttgaaacgtgaaagagggaaaatgaagaatattgtttccaatgtcctctgcaatctcattacctgcttctttgttaagacaggattttacacatccacaggtgcttcaccacacctgtgtatgtgccaagttttaaggcgtaatgtgcatttcccttttttacatgagctgtagttctttctagcttcgtcctctctggagattttgtttaattagtcaaagactttagactatgacatttcagacaatggtaaattggtgagacagagtctttataggcatagattcttttcagtttccctgaaatggcaacacttttgaacaatcttgaaacccagcatgtctgttctctgggaagagtaaatagtttggaatttaaaagtaccttttggtggcagattgcaaagtaaatctccctggggaagtgcactctagggagtcaggagaagagactctctaatttagagttccaaccctcctaccactgttttataatttaacctatggaagttcctattaatgcccagttttcttctttgtgaatgagcagcttttgttagatgagatcagaattttctttaagacttccgtgggttttggacactaacttgaaagtagccagttgttgttatggaaaattataaaactattttagatttaaaattacccaaactttgccttgtttcattctgtttttttttttaagagaagtttgaattatttaaaattacttctcaagataagtaaaaacaaaagagactcctacttattgcttaattggtgatgcacatttgctttaacttagttaattttcacgaagtagcaattacaaaacagaccaaactggcgctgattaactaggatcaaaatctaggtcttttttctcttggcatcattgtctagacttccaggcttttggagctatattcacagtaattaagtgagaagacatgctcaaaatgatgccaaagaagtgaggtaataggtgttatctgcctgctgtttctggatttcatttggctctctgtttttttctgggagaggaactccttctatagcatataatatatagtagctgagatggtgatggtatatgatccactggttagatactttattgtctctggaaatactaagcagagttcttcactgaggagtattgcttgatcgtgatgcttattgttacaccacaattttcatcattagtaaaggatgagtttcaaatgatgaatggtcccaacacccatttttgctttatccagcttccgggaatcttgttttatttactaaggagaatttctctgtgttgtctcataattgttcattgactgactgctccagcctttgtaagctgtttttttatttattttttatttttagagacaggacctcactctgtcacccaggctggagtgcagcagtgtgatcatagctcactgcagccttgaccccctggactcaagcagttcttcaggtagctgggactgtatgcgagctccatgatggctgactaattttttaattttttgcagagatgggacttgctttgttgccaaggcaggttttgtttctaaatcctggcctcatacagtcctccagcctcagcctcacaaagtagtgggattataggcttgagccatggtgcccttctgagaccctgtctctacaaaagatgtaaaaaatactagctaggtgtgatggcacacacttgtagtcccagctacttgggaggctgaggtgagaggatcgcttgagactgggatgttaaggctgcagtgagctgggatcacaccattacactccagcctgggtggcagagtgagaccctgtctcaaaggaaaaaaaaaaacaaaaaaaaaacgaatgaagtttaatagtgatttttccttactacatatgcttttttttctttttgttaccttttgtgaagaatataaattctgagtttgatgcacacttgttaaccatgataaagtagaggaagctgtgaaaatttgctttaagaaaacatcacatttcattgttgaaatagatgagtatggaatttaatttaaaaaaagcaaaatgtatagtttttacactccccatggcccccactttgaaacacatcatgtccatctaaggcagtatttgagcttaccaggattctttagcatatcacaaatataaatatgaatattttataggcctttgtaacttttaatgacatttgcaaagtcatgttatttgtaaagtgtttaatgacaatatttgttgacacttttaaaaaaaagtagatttttaagaacttacacatattatcaacttaaaaaaaccaaatggaggatttgtcaccaaggggaccaactcagtgcagtcagtactgcaggtgtccaaacccacaccaagtccccatgtaccatgaatgcagcttccaaagaatcatggtaggcttttctaattgttgagatttattttaatgtgatacttgattggaagagtgttcagctcttttggtcattttttgtttttatttaaaaaattagttgcaaccatatttataaagcaaccttgaccaaatgtttttctaataggtgtttcatctctctctctctctctttctttccatccttcctttttttttttttttgccaaggtttcactctgtcacccaaactggagtgcagtgtgttttctgctcactgcagtctccacctcccaggctcaagctatcctcctgccttagcctcctgagagtagctgggactaactgactttttgtatttctttgtagaaactgggtttcctcatgttgctcaggctggtctcgaactcctgagttcaagcaacccacctgccttggcctcacagagtgctaggattacaggtgtgagccaccgtgcctggcctaggtgtttaatcttttatgcagtcctgtaacttaccttgaaatgtgcctaaagcagcttttatatgtttgattatacttctctttgtattgcctgtagccgaaaagaattccatttattttcttttgacatttctgtggttagtttttaaatgttgctgcaagagtgatggttaagtacaattatttttcagacttctcaccctaagttttacattctgtttggcaaattcacatggctggaacccacattttatctaagtattaattcagcactattacagcaagctaaagaattttgtaagaaccaaactgattgtgattttgtaagcatttctttacttctgttttatgtaggctcagtcttttgttgatgatgttcattttcacttaaatcctgtcaaaggcaaaaggtttaggattttgtcttttacatttgaacagctgtttcttttggatgcatcctgggagactcttgtttatttctctggctacctctcatctgttttaagaagtcatgaaaaactctgtcagcgtttttcttgccagtttacctcttgggaatatcacacttcatttatttcccacagatttgggggaaaaactcactttagtgccactaatttattttttatctggttgtgacattcagatttttagatttttatggttctgaaaattgctaattcagttcagctgcagagattagcatgtgtcagtaaattttaggatgagaaacagaacaggtaagttttaagaataatgaagaaattgtgcagtttgactcttcaatttaaagtgcttgtgatagttcctgcaaaaatgtatatgtgattcagagcgtgttgtgggggaagtgagcagacagaactctgagggaaagctcagcagagaggttaagtaccatagtagacatgtataatattgtcttgagtttagtcaggcaaatgggtatatatgtcttttcagatttattgtagtggacgggagcatgctgattgctgggagagaaatgagaagacaagcttgattcaggactgtttttataagggatcaaatgaaaaaatttacttaaaagtcacaaactataaaatgtagtgtacaaaggctagctatctttatagaactaagaactgtgaatttcagtgactcagcaatcaataaaaagtcaataacacacacatcttgtagatgatggtcattttaaattttctcaatgaatagtaaagagagattaacttagttatatttaaagcaaatagaatcaattaagtataaagaatgaatattataaattgatatatagaacgactattagaaaataaaaatgttgggctgggtgaggtggctcttgcttataatcccagcactttgggaggctgaggtgggcagttcacttgcgctcaggagtttcagaccagtctgggcaatgtggggaaaccccatctctacaaaaattagccgggtatggcggcgtgggcctctcgtctcacctgattgggaggctaaagtgggagcatcccctgagtccagaaggtcaaggctgcagtgagccatgcttgtgccactgcactccagctttggcggcagagtgagaccctgtctccaaaaaaaaaaaaaagaaaagaaaagaaatttgttataatttactcactaaaccaacaaactttttttctcagtgcatacatttatttacgtttttttccctctaatgtctagtcatgcttataatgtaacacgaagggctaagtctgatttccaagcttttcatcagttgatggacccttttctctgtgaagaatgatgaactctcaagctatctaaattctgtctcccttgtgtgtgtgttctctgtaaagtagtttgtttcatagaaaacccctaagtaggtgacatattgcagaaaccatgttgccaacattttgttatacttttcatgtaaaacatatttccatttctcttcactgccagtgtttctccagtttcaagtactacactatattattcaaaattctgtttattactccacatcttactactcttaatcaccatgaaaattgcccatcttcttttatagttcagtttcaaattttcacatgcctgtttagtgcagttgtcatagtcttagtaagaaataaattacactaaactatttcaaatggagaggatttttaatacatgaatttgttatactggctgaatgattaataagggggatgctgaggctgggcattgtggttcacacctgtaatcctagcactttgggagcctgaggtggaaggatagcttgagcccaagagttcgagatgagcctgggcaacatagtgagacttggtctctacaaaaaataaaaataaaaaggaggatgcggaggtaatctagagattaataactgcagaaagcagctgacatccctgagagaaagtcaggaaaggggaaatacaaagtaaatgtgataagacatctggactgtgaaacatattcataactgttaaaattaaaatgtagtcgaattaaatttaaaggagtttaattgagcagtgaatgactggtgcaggcatcccccagaatcacggcaaattcatagagactctaggggtaccttctgatcagaacaaatttatagaccaaaaaaagggaaagtgttaaaaaaaaaaatcagaagtgaggtacagaaacacctgaattggttacagggtgacgtttgccttgtttgaacactcagcagtctatgattggttgaagtatggctgctgggattggccaagactcagctgtttttacagctgcatactctttaggttttcagtcttgtctgccttttaagctgagttagggttcatccacagggactcagatttaaaagtacggagtccttctcagaccatatttagttcgctttaacagaactgtaataacaacacagttaaattatctcaattcattggtcaaatctcaactcaaattggtcaaaaaccaaaatctaggaatatgcatttaaacttgacacagaaagattaaaaacattcctctagactgccttcccaccccttcagataccagccatacgtcccggcctctggaacttttgactgactggcttcaatttggagatctcatgatcccctctttgggtttgataaatttgctggagcagcttacagatctcaggaaaacatgtttacttgtttattataaaggatatcacaaaggatacagttgaagagatgcctatggtaaggtatgggggaaggggcacagagcttctctgcccttccttggtgcaccaccctccagcaacttccatgtgtttggttacgtagaagctcacttaaccgtgtcctaggttttttggagacttcattatgtgcatgattggttaaactgttggccactggtgatcaacttgacctttagcccctctccttcccctgaggttgggggtccgactgaaagtcccaaccctctaatcatgcccttgtgatgatcaactctagctgtcagtcaacattagcatacaaaaagacagacgttggcgattctaaggtttttagaagttgtgtgacaggaatcaggatgaagaccaaatatgtatttcataatatcactgtggtggtgtcagaaactttacatgctgaggtgtgagcagagagagtgtatctataaaatgtttgcatgtcactaacgattattgatttagaacatcttttaaagtgcttattggccatttgtctatttttggagaaatgtctattcaaagccctttgcccattttttaattgggttgcttctttcgttgttgttgagttgtaggagttctttatatgttctggatatcaattccttatcagttatgtgatttatatatattttatcctatcctgtcaggtgccttttcactttgttgatagtgttctttacagaaagtttttaatttttggatttttttgagacaggtctcattctgtacaccagtctggagttcagggtgttggaaataactcactgtagcttccgtctctgggatacaagggatccccccagcttatcctcccaagtagctgggacgacaggcatgtgccaccatgcctcgctcacaagtttttaattttgataaagtctaatttatcttttgttgtctgtgcttttggtgtcatatctaagaaaacattgccaaatttgatgttctgaaagtttccccctatgttcctttgttggaattgtatacttttagctcttacatttagatctatgattcattttaaaaattttgtttttctgtgttctctcacagaatggaactatgattcatttgatttaatttttatgtatggtttaagataaaggcctggcttcgtttttttggcatgtggctatccagtttttctagcaccattggttgaaaagactgtcctttacccgttgaatagtcttggcacctttgtcaaaaatcatttgaccacgtatgtgaaggtttatttccgggctcttttcttttcattgctctgtatgtctgtctgtatgccagtaccatactgacttgattcttgtagctttgtagtaagttttgaaatccaggtttgagacgtttaggtttgtcctcctttttcgagattgttttggctattgggggacccttgagattccatatgaattttagaatgggcttttctattttcccaaaatttgtttttgggatttttataggattctgtgtatttaaaaaaaaatatgtttcataatggacacaacattctttttctaagtaggtgaagaaagcatcattgcttgagagtggaattaagatgtagtattcaccttaataaagaacttatacataacttttatagacactcccaagaactgggaatgttctagttaatgattcccttcgtaggtacttaaaaatctaatttgaagtcctagttctaagagaaacagagagagagaagaaagaaagaaattagtggagtaggaggtggtctgaattaggggtatatcaggacctagagtgaagattatgtctagtggtctcgtgtgacaaatgaatgagaactctggctagggatgttttagctgagatgtagaagaagaaactgacaggaaaccagagactatgtaaaggtgggagaaatgaggggaagaaattagtagagataatcgtggtggctatcagtagtaggtccagagagggtcctaaatagcagccattgaagtaggaagtggagagccagcattgcagacattgtagaatacttttgttgggaattcagtgaaccaacagcatctctttatcagtacactggtgcttttagcccacagtcttgggggaactggtcctgggattggagagaaaactgagttgtcatgctgtataagtaaaagctaagctttgaatagtatagttgcttttgagagaacacaagtagcctgtgatcaagctatcctattatgtgagtctattattgtcttctgaggggcagaaagccatagcatttcaatgttgaactaattataaagagtacaaaaatggtgatgatttcagtagtgtttccctgctccatatagtatcactgctcagaagtgagaaagagtttgatcagtggttttcatttctgccttcccacttagaatcacctgatgcctgggtccccttctccagagattctcatttaattgcttgggatgagcctaggtaatgctaatgtgcacccagcattgagacaaagctgtggaacagtgccttttccctcctctaatcccacagccgattaggaacagtgccttttgatacatattgcccaaatgatactttataggctttgtttgctgaggatggttttcactgaaaggagcaagatgcccccattttcagatcttatacaagcaaagtgaattgggctagtcttaatttagggaaagtagctctggtgattgagaagacatttctgttcagtagctaaaacagactgttacagcttttttacagataatatgctttgcatcgtggtctgtactcagaaggtttttacggtattgattttatatgccaatttattttggtgatagaaccaaattataccctgccaggtactatgtaattgactcttctgattcacccagaataagagtgggtgttttttgcttccatacaatcagatacgcctagatttaaagttatactatagtgttttcaaactgttaaaagcagccaaactgcttccccccatatgacgagcagtgcctgatccatagtaagcccctaaatagttgaatgaaaactagctgtaaatgaaattttccagaagtgtcactttttggctgtttgcagtgtggatgctttatttggcgcaatagcttttttttttttttttcctttttctgactggtactgttaattttgtacagttcagtaaaagtttaccagtacaagcttaacttaaaaagagccaaatactctaagccacccttagagaccttattctgtgagggtctgggaatcttaatattccagctgttctgtcattgtgaatcaaataattaagacttaattgctaagctggaaaagtcttttttaggatgccatgacagagatttaggtcttttaaaccagttcagtactatactgaatagagaatttcttactttttctgagtaggtgatctcattgtttagtatgaatatttctagaatgtaactcataaataagcttttattttattatttttttagaggtggagtctcactctgtctctaggttggagtgcagtggcacgatcttggctcattgcaacctctacctcctgggctcaaaccatcctcccacctcagcctctcaagtagctaagactataggtgcatgccaccacacctggctaatttttgtatttttttgtagagacggggttttgccatgttgcccaggctggccttgacctcctgagctcaagcaatccacctgcctcagcctcccaaagtgttgggattacaggtgtgagccactgcgcccagcccacaaataagcatttatatagagacatggtatggtggctaggtataaagaaataccatctctgtgtaactgattttaaatattaaggtgtttaaagaaaggtaatgagagatgatgattcatgctcttttttttgtactaacattacgggatctttggggtgtcacttttctggccagaaacctctgtggcctgtggcacctttgcctgagttcttgtcctgcgtccaggaagattgaggtatgcagacaagtgtagagtgtacaagatgaagaggagctttactgagtgtcagagcagctcagaggagacctgcagtgggcagttcctctctgtaggcaggtcatcttgttgagtgttcgactctcggcagagaggaggccctagagtgggtggctcctctcgtcagccaggttgtcccattgtctctgcagctctcagcagagaggaggcctgcagtgggtggctcctctctgcctttggtcgtcctgatgtctgttgctctcagccagagaggaggccctggagcaggtggcttctctctgtaggcaggtcattccagtgtttgcagctctcagcagagaggaggccctagagagggtagctcctctctacagctggtcatcctgatgtctctccttcctctgccctgctctggttgagcctgaggcttttatgggccttacaggggaggtggtgcatgccagttggtccgtgggcagcccagaaaaggcaccacaagtccccactctggtccatgggatgggtagcccacccctagccttcagaacctccctggcaaaaggtggggcctcactgaggactcgccccttctggcacaggagcccatttgcctcccaccactgcctatggcccccaggttacttgtgccaagggatgcccacaggctatcgctgaactgcccccctgccctatcttggccactctcctgtggtctttggcacccaaagtttggaggggccaagctggaagggacccagcgggtcagtgctgccctgagcctatgcatacctggctgggctgcaacagtgcccgggcttggccccaaccccaattggagaccagagcagatgctgggagtggggagaggccaggcagcaggagcagacacccctgagcctgtggtgacaggggctctcccaggcccctgagagcattgagaggcctgggcccacagccatgacctgagtggctggagctgtgcctggggagctcctgccctgccaactcaggaggggtgggactcctgcctgtccccggctgcagagtacacagccttagctgtgctccttctctgtgtcttcccatagccacggcaggtaaggtgcaggtggcatggtggccctggccagccctgcacaaatgaacctttggctcccaggacacggccagaagtgaggttgaggctgcagtggcctcaggcctgggagtgggtcctacccagctgtgccagggtgggggtggcacagttggcttccttggggacatgggcacaggggtcctactgctgctcctacagccactcctgctgccctgtcccgcctccttgccacctggggtggggctccaggccctcaccgggcctggactggcatccagggcaggggtgatgtcgttgcagggtccccctgcagccccagggctcccccttgcctggcttacgaccctgccagggtggcgcctctgggagcagattctgggcccaggcccagccaccaggagtgccaggctcagcagacaccctgacatggggcagatcctggggacacgatctccggtggtgccaatctgagcctactgccgaagtacgggaacctggtaccatcccagggccacaggccccatgtaccattcgccttggtgtctatacctgagcacctgtggcctgcagccgcaccccacctctgccagtgccatgtcagcagccactttgtatggtccatcactgcaatcactaagatagtatttcagtttacagagtattatgtgaaattggtttacttggcaaaattgtctcatactataattctgttttatagtgataaatatttttagagtttggttgatagaatggcatcacaaatacagctgttgaatgggtgatgaataatattaaagtgtacttcaatttgtgtagagtactgctcattaaatatctgtttttgaagtaacagagtaagaataattggatggtcgtaatgtagaataaaacacatactgtgacttaaatgaatgttttgagttgcttaaaacattcattaaaaaatttccaaaagttacaattaagtaagagcaatatttgtggtagataacatttaaaatacagccttttttattttcaagtactaatgtccctggtgttgaaaagagatcccattcagaaataaataatctctctactggagctcttcttgaagagtcctcaagtacagcccaacaattgaactgtgataaattcccagaaaaaaattttctttgttactttcagacagtctccctctgtcatccaggctggagtgtgttgtcataatcatagttcttgaactcctgggctcaagggatcctcccatctcagccaccctcacctcagcctcccaagtagttagtactacaggcacataccagcacacccagctaatttgtaaaatttttttttatagaggcagggtctcactgtattgcccaggctggtcttgaactcaccttagtctatcctccctccttggcctcctgaagcgctgggattacaggcataagctatcacgcgtggcctttttattcttattgatctaactagaaagattgatcatacagtattcccgatgttctcttcatcaccaccttcaaactataaactgtggaaaagaattttcagtttgctatagtataaaggctgcattacataaagtgaagtatgttttcaaaacagagacctggctgtgaatcacagttctatcacttactaattgtgagatctttcataaattgaaccttattccacgtggaagtcctgccatttgttcaatagaaataacagtgcctgcatcataggatgctaaataaatgttccttgcctgtcttttgttgcagtagctttggcgtatttaacttttttttttttaagttcagaattctagagaatgaattctttatctgctctgctgttaggtttcaatatcatgtttctggaactttttcttaactctttcatatcagtttatgatactttaatcatcattactgaaaaccagatgttactaataggtatttatatcatgaaatattatttcctaatattgttaaaagatttcattagtttgactcttaccgtatttattatgtgtgatttatttttcctgcattgttgtttaaaaaataaaaacaacaaaaacttacacatcaggtaaaactgatatatagagtagtttagaaatcccaggataaccactcagaaagtcatggtgattaccttgatgtcatctagaaacatagtgaggttactgtgtaaagttttccagaaatcattcagcagtgttagctgttaagcaaatattagagcacatgaaaaggaaaaattctgacttagtaggcatatctgttactagtttctttgagaagcagtccgtcattgtattatgatggatttgggaaagagttcaagtgctaaaatagttcataaggaaaagaattcatttctggtttatgtatgccagcttttattttgtgaggtggattatggcctcttgatcgttattctgtaccatattttcactcccttttttcactccgttttttttaaaagctatttttgttcataaactctgtagaattgtaggcagaagaaattacacatgacatctgatccattggtattgctttttgttagtaactcttcataaatagaattcaagatgaaaacatttgaagaacataacctgaaataatggtttggcctttctgaaaagtctggttttgcccagtcttattgtaaatcagtataagactttttttttttaatggctgaaacattttttcctaactaaatcaaataaaacaataatttttcatcttcaaggtagatatgaggaagaagatgaagagaggatgcactatctattaatatttggctagattaattgtatttgtttacattgaagtttgattcacatttatcccaagtcatccattagaaccatgctgaggattagatagactttgaattgtaatgtacattttttaatttattagatgagcagtgtcatgaggaatgaatagttctgccaaagataactaataattactatttttcacctttcatgcctatccttttgctggattttatgaggataaaaaattataagcaatcggcttgtctgcagggaaacatctgtgctataatttccagcgttaatggatatagtagaaaagttggaaatgatttaaaaagatgaagtccatggaggtttattttggtaaataggatttatgtgttttgatttctctttaaacctgtttttaaagctattttattgaatacgttttcttcctctccacctgaagcaacaaatagcaagattcttttagaggtccattcttaatacaactatttggatgcctggtatttgtagagtacatactgtatgttagatgtaaattgatttatttgggaaagaccaccacacaaagttattattttccttatgaactgccacttgtatatttaagtcatttgtttctctgagaagaatattctaaagtttatgtgactttgtattctaaatttcagaagaattaggagcttagtcctagaatcaagaaattctgcttctgctatttattagttatctggatatactttttattttataggggtgagattgcttgtagaatctctctctgctaacatcctgttactggactttttggcaagtcctttttgttgtcatattttttccttacacactttctttgaactcttcctccatctccttactctgtggaaatttatgtaacactactttccttagaaatccttccacttcaacattgttagtgttcttatattctttatatcttggaaggcaactcagcaacctcctggcccttcaccgctttctgtaggttgtttgcctgcaacccttgtgccgaaaatgcataaacagctctctctccctcttttttttttttttttttgccatcattcctcatttttctggacccattttctcattgtttgagaattttagtgtctggctcataatttacttttctgttttgctttctgccatccacaaagatgacttgtgacattcattgttgtgctgtccaaccattgcctgtgggctcctggatctaccctgtttgttgttgttgttgttgttgtgttttttttttgagacagtctcactctgctgcacaggctggagtgcagtggtgtgatcttggctcactgcggcccacacctcctgggttcaagtgattctcctgcctcagccacccaaatagctgggattacaggcatgtgccacgctgcctggctaatttttgtatttttagtaggggtggagtttcaccatgttggccaggctgatcttgaactcctgacctcaagtgatccacccacttcagcctcccaaattgctgggattacaggcatgagccaccacacccggctgatccttttttcttcccattctttgcctcccaatagcaactgtatatagacacatattcagcaatctatatggacacagtctagatctgcactgtccaatgtggtcgctattagagccactgtggcttttgagcacttgaaacatagtttctgcaaattgagatgttttgtaagtgtaaaacacaaaattaatttcaccagttttaagtttttctaatctggtgacctagaaaattttaaattacttacttgtgtggtttgtattgtattttttatatttttgttacgagcactggcctggacctggtctctactgatgtattagtccattttcagggtgctggtaaagatatacttgacactgggcaatttacaaaagaaagaggtttgttggacttgggctccacatggctggggaggcctcacaatcatggcagaaggcaagggagagcaagtcacatcttacatggatggcagcaggcaaaaagggagcttgtgtagggcaactcccatttctaaaaccatcagatcacgtgacacccattcactatcaagagaacagcacaggaaaagacctgcctccataattcagtcatctctcactgggttccccccataacacatgggaattatgggagcttacaagatgagatttgggtggagacacagagccaaaccatatcagctgagaactgctctgcctttgaattcttgaagtctaaaatttctccaaccagcccagtggctcatacctgtaattccagcactttgggaggttgaggcaggatgatcacttgaagcgaggagtttgaggccatcctgggcctcaaacatctggtccagcaaagcaagaccctgtctccacaaaaaatttttaaaaattagttgggcatggtgttttacacctgtagtctcagctacttgggaggctgaggtaggaggatcccctgagcccaggagttcatggctcactgcagcatgattgtgccactgtgctccagcctggcaacaaagtgagaccctgtctcaagaataaaaaataaaataataaataaataacatttttctgaccatagtctttgttcctttttcctatcccatgccagtcctgttatacctatttcacagcctacaaccttttaattctttaatccatttcttttctcaagatggcagcccctttctgccttcactttctcttatttacccttgatcctatcactaactactataactttatttttataaaaccactagttctctttgttttaaaaaaatcaaactaatggtttattttgtagtgatgaggtcttgctatgttgtgcaggcttgtctcaaactcctggcttcaagtgatccttctgccttggcctcccaaagtgttaggattacaggcgtgagccactgcacctggcccactagttcccttcccccccccgactcaatttctctttcttcccagttctcgtccctgaatctaactcagcaggtcttttcctctgttcttgctcccaggatggatggctctgctttggaaattccattacctgtgttcgtggagtctaattaaaactttatgattggggccaggcatggtggctcatgcctgtaattccagcactttgggaggctgaggcaggcggatcacgtgaggccaggagttcaagaccagcctagccaaagtggtgaaaccttgtctctactaaaaaatataaaacattagctgggtgtggttgtgtgcacctgtggtttcagctactcgggaggctgaggcatgagaatcgcttggacctagggggtggaggttgcagtgagccgggatcacgccactgtaccccagagcgagactttgtttgggccaggcgcattggctcaagccagtaattccagcactttgggaagctgaggctggagattcacttgcggcatccaggagtgagaggttacgatgagctgtgatcatgaactcccgcttgggcaacagcaagactgtatctcaaacaaaaaattaatgatttattaatacagctggtctaaactctatttaggtataatatagctacaacttagctgcttgataatctttttagtaatcactaattgactttcagtcatatcctgaactgtgcttacttcagtactaggttggtcaccaacagctcgacaggccatacactgtatatagcttgtgaagttatgtatcatgagtagctctgcttcaccttgtctaattctgctgcttactgtttgttgaaacacctgtgttttacaatttattatgacatgtttaagcttataaaagtatattgtaacgtgtttggtttgaaaggataatcataacacaaccaaccaccactcaccttaagtcgattatcaatatctttgaagccactctgtattcctcctttatctcagctgcctctttctccctagtggtaacaattatcctgagttttgtataagtagatatttgttttataatttcactggtgtctgcattttgaggtttacattttgaattagccatcatgtgtgaccttgggcaacttactttattatctctgaacctttctcttttttttcccaatttaaaaaattgtgttaaaatgcaaatagcacaaagtttaaaatcttaaccccatttttaagtgtacattttaagtatacattgataatatgcagtgatcacacgatccatctttataactcttttctttcatcttgtaaaactgaaagtctatacccattaaacaataacttccctttgacccctccctttgcaccctggcaacagccattctcctgtctgtctgtggctttggctattctttaactacatcatataactgttatcatacagtagttgtttgtgcctggcttatttcacttagcatattgtcctcaagttccatccattttgtaggatatgtcagaattccctttctttttaaggctaatgtttcactttatctatggtaccatattgtgcttatctattcatttgctgatgcatacttggttggctttcatgttttaccagttatgaataatagtgatatgaatgtggatgtacaaagaactcccttaagacctcgttttcatttatttagagtggatacttggaagtggaattgcagaactgtatggttattcctattttttgtgaaaatgccatactgttttccacaatggctgtacctattttacattcctaccaacagtgtgcaagagttccactttctccacatcttttacaacacttttccttttttttgagatggagtcttgctgtgttgcccaagttgaagtgcagtggggcgatctcggctcactgcaacctctgcctcctgagttcaagcgattctcctgcctcagcctcccaagtatctgggactacaggcccgtgccaccatgcccggctaattttttgtatttttagtagacacaggctttcactgggttagccaggatggtctcgaactcctgaccttgtgatctgcatgccttggcctaccaaagtgctgggattacaggcacgagccactgtgctgggcatggtggcacgcacctgtagtctcagctacttgggaagctgaggcaggagaatcacttgaacccgggaggtggaggttgcagggagctgagatcttgccactgcactccagcctgggcgacagagcgagactctgtctcaaaaaaaaaaaaaaaaattgtatgtgtgtatgtacacatatatatactagccatcttggtgtgaggaggtgatatataccaatatagtattgatttgtatttccttaggattagcatattttcatgggcttgttggccatttgtgtatgtctttttaatagaaatgtctattcgtgtcctttgcccatttctgaatctgattgtttgcttttttgtgattgagttttaggagttctatatattcaggatattaactttttttttttttttttttgagacagtgtctccctctgtcacgcaggctggagtgcagtggtgcgatctcagctcactgcaacctccggcctcctgggtttaaatgattatcgtgcctcagccacctgagtatctgggattgccattcctggctcatttttgtatttttagtagagacagggttttgccatgatggtcaggttggtctcgaactcctggcctcaagtgatttccccaccttggcctcccaaagtgctgggattacaaacaggccatggtgcccagcccaggatattaactttttaacaggtgtacagtttacaaatattttctcttcttctgtaggttgcctcttgactctcttggtgtaatatctttcgatgcacaaaaattttaaattgttaatatgcccaagttgtctacttttttttttttttgcttctgcctttggtattgtatctaagaagtcattgccaaatccagtgtttcagagcgttttctctctgatttcttctcagatttttttacttttagctcttacattttggtcttaatctattttgacttaatttttgtatttggtgttaagtgagggtctaacttcattcttttgcatatgtatatctaatttctcccagaaccatttgttgaaaatgtcctttccccattgaatggttttggtacccttttcaaaaatcgtttgaacatatatttgtgggtttatttctgggccattttttcccatttctaattacttttggtttatttttacaccagtactgcacttttcatttttgcagatttgtaattttgaaatctggaattgtgaggcctccagcttttttcttttcagctattgttttggctatccagacttccttgagaatacatatgaatatcaggatggggagtttttctgtttttgtagaacacaccattgggattttgatagagattgcattgaatctgtaagtcactttgggttgtattggtatattaacaatattaaatcttccagttcatgaacaggggataattttttgttattgggtttttaggttatctcatccactctcatggcaaggactgttggttatgtttgctgattcttagttcattctgggttgactctgctctcttcatgcctaattactctgtagacttttgtacctagagatctctttgacattaaaactctccataatataaatgaattcatcacttttttattcaaagcagagaaaacaactattgcagaagccttgagagaaaaaaaagttgatatatttgagagaataaaataaggccagtatggctggacagtaatggtatgtgaagtgaagtcaatgatagcctgggacccaatcattttgggttctgtaagcattcttcaccatctaatcctcaaaccttggagaagcagctttcttccccttatatttaggtgctcagaaaatcctgctgtttctataatatatgaattaactcccaaatctgccttttttttttctgtcgagatccactgctgttatcaggcccttatcactatgtacctgggctgtcggaatagatccctgtttgatatcttgacaccagtatcttcactaagagttcatattgttgtaatggctctcttttttaaacaaattggatgatatttctgccctgttcaacatctcctaggattaccttcatggcgaagtccttacttgacccgtctttttagtctggccctaatctaatcctctgatgtcacctcctctcactctacctcatgcacttctattctctggcattactgacgtgtttatggttcagcagacgtgccctagtttttcaggtctttgtgcttctgtttaaaatattccttgttttgcctacacatgatctcctctgctttttatggctgactgcaagctcaccatctatcactgttgatctgccacctttggaggctccctggaactcttctcccaggaagaattaatcacattctgctctgtacttcttgatatattattcatactccttacaccactttctttttttttttttaaatttatttttttattgataattattgggtgtttctcacagagggggatttggcagggtcatgggacaatagtggagggaaggtcagcagataaacaagtgaacaaaggtctctggttttcctaggcagaggaccctgcggccttctgcagtgtttgtgtccctgattacttgagattagggattggtgatgactcttaacgagcatgctgccttcaggcatctgtttaacaaagcacatcttgcaccgcccttaatccatttaaccctgagtggacacagcacatgtttcagagagcacagggttgggggtaaggtcacagatcaacaggatcccaagggagaagaatttttcttagtgcagaacaaaatgaaaagtctcccatgtctacttctttctacacagacacggcaaccatccgatttctcaatcttttccccacctttcccccctttctattccacaaagccgccattgtcatcctggcccattctcaatgagctgttgggcacacctcccagacggggtggctggctgggcagggggctgacccccccacctccctcacggtcggggcggctggccgggcagaggggctcttcacttcccagtaggggcggccgggcagaggcgcccctcacctcccggacggggcggctggccgggcggggggctgaacccccacctccctcccggatggggcggctggccgggcgggggggctgacccccccccacctccctcccgggacggggtgactgccgggcggagacgctcctcacttcccagatggggtggctgctgggcggagaggctcctcacttctcagacggggcagctgccgggcggagggtctcctcacttctcagacggggtggttgccaggcagagggtctcctcacttctnnnnnnnnnnnnnnnnnnnnnnnnnnnnnnnnnnnnnnnnnnnnnnnnnnnnnnnnnnnnnnnnnnnnnnnnnnnnnnnnnnnnnnnnnnnnnnnnnnnnnnnnnnnnnnnnnnnnnnnnnnnnnnnnnnnnnnnnnnnnnnnnnnnnnnnnnnnnnnnnnnnnnnnnnnnnnnnnnnnnnnnnnnnnnnnnnnnnnnnnnnnnnnnnnnnnnnnnnnnctcggcactttgggaggccaaggcagacggctgggaggtgtaggttgtagcgagccgagatcacgccactgcactccagcctgggcaccattgagcactgagtgaacaagactccgtctgccatcccggcacctcgggaggccgaggctggcggatcactcgcggttaggggctggagactggcccggccaacacagcgaaaccctgtctccaccaaaaccagtcaggcatggcggcgcgtgctgcaatcgcagttcggcaggctgaggcaggagaatcaggcagggaggttgcagtgagccgagatggcagcagtacagtccagctttggctccgcatgagagggagacgtggaaagagagggagaccgtggggagagggagagggagggggagggggggagggggaggggagggggagggagagggagagcccttacaccactttctatgtcatttttactgttgttaggtaaattgtaaatccctgtgcataggaatcgtgtctttttcaacttgatttccatgacttagaattgctactgcaaacaaaaaagaaaaactcacaaacttgttagattgctacatctgaagtcaagtatagtttgagagtttttttcattctaatgtgagtaaaagtttttgcgtgcctaatgtttttaactgagggtactactaattagcatcctcgaaggaaagaaaactgaaagtgattttgctttaaagcttgttattcatagtaaaagaacatttaccatgtaattcagggaagctttagaaagaaaacctaggggatctgttggccatatcaaaaaagtacaagctacatggacagtgaggtgatactgtaatacttccacctgtaggtcaactggagagacttggttttttccaaatagacctagcttaattgtgatgacgcatgccaacctaattaacctcctaatgttacttgtctttgtttttgtattgtcaggaacttggtgtgtgggttgggaatattagaacataatagaactatgtgatgtctaaattgagctttaacacaaactggttggtgttattgagggaaagtataacttattagtgggaatgggaaaagaagcctgatgttgtggtgaggtagaaatttccactgtgttactgtgaacaggaagtaaagggctaatggtcggtgactcagctgttttctgaacctgtctcatatgattcagtgtgcatgatgtctgtttattctcgacagagtaagtactacgggagtcacattacacaggcagacataatgtttatttaaccaactcagtgatgacctaaaaataacttgtggggtttttgtactacatttagcataatcagatagaaaaatcataatggacacccatcattgagtgctttcccttataaataactggatatatagtcagccagtactatttcatttcttacattgttaaggtgcaatctttggtatttaaatgaaaggtagcaaaagaagatagcctttaaattatccataaaataattctgtaccattttagattatactttggacagatatgcattttcggtgcttagtgccatcgttgaggtatttttgcaccaaaattttcatataggaacctttttgtgaggctatagcaaatgttgttttgaaatagaaatttacgtatttgctggattttatgttaatattaaattatagtagcaatagttttactttgattttcttgatttattcatcttgtactgaaggtttgtgcctaccatgtactgtaattgagtcttaaatatgtcagagccgggcacggtggttcatggctgtaatcccagcactttgggaggctgaggcaagtggatcacctgagttcaggagttcgagaccagcctgcccaacatggtgaaatcctgtctctactaaaaatacaaaaattagccaggcattgtgctgcgcgcctgtagtcccagctacttggaaggctgaggtaggagaatcgcttgaacccaggaggcagaggttgcagtgagccgagattgcacccctgcactccagcctggatgacagagcaagactctgtctccacataaagaaaaaaaaagaaagaaagaatcttaagtatgtcagagtatggttactgttatgctgtatacctgttacatgcttggctttgaaggagagagcacttggaagcctgagcttacataataatcataatctgctcattgtctgagaaattgtgagttgttatggtttattctttttgacatttgagtattcttgctctcagaggtgcagcatttgtagcatataaactttaatcagagattatttcaaaagggaaagggaagctagagtcactaagaagaaataggctgggcacagtggtttatgactataatcccagcactttggggggctgaggtgggcggatcacttgaggccaggagtttgagaccaatctggccaacatggcaaaacactgtgtctactaaaaattcaaaaattaactgggggtggtggtgcatacccatagtcccaggtattcgggaggctgaagtatgaggatggcttgaacctgagaggtgaaggttgccgtgaacaaaggtctcaccactgcactccagcctggctgatagagggagactctgtctcaaaaaaaattaaaataaatacataaataagaaataaatgccagcattctttttacaataatgctttatgtagtgggaatgtgtgatcaatctaatagtcagtagaactacccagtggttgatgctatatataaagtaggaaatacgtaccctttctataattgattttaaaagtttctgcattaagcttacactcttttatttcactccatgtttcagtaaaaatcacaggacttgtttttatttacaatattataccattgtttgaatatttaatgggatttatattttaaaatgttttagttggtatagttattagatattctgtattaacctagaatggaaaattaaagtatgtatcttctgattcactgcatgtaaataggacctgacttggacatcgtttgaaatgtattccagtaatcgcgctggctatacatggtcccatacctgcccttatcccaacagataaatggtattcttctttatttattcatttatttatttatttatttttgagacagggtctcactctgttgcccaggctggagtgcagtgacatgatcttggctcactgcaacctcctcctcctaggctgaagcagttcttccacctcagccttgcaagtagctcagaccacaggcatgcaccaccatgcctgggtaatttttaaattttttttgtagagacggagtcttgctgtgttacccaggctggtcttgaacttttaagctcaagcaatcttctcacctccgcctcccaaagtgctaagattacagatatgatcactgtgcctggccccgcaaattggtcatttctgatggttgtctgggcctcaaagcctgagttcagcatagtgttttggcacgttgcaaagaataagtaagaaaatgttgttaagtggacgcaactattccacatgggatgatgttagatttgaagaaggaaaaagtggttcctcaattcctttcagattggcagttgcaatagtaacagaaccctcattgacatgaagagccaatgttttcctgtagtagaggaattattttcttgttttatttaattatttatagtgtttcttgattatgttcatgggggcattttgttttgttttgttttgttttgagacggcgtcttgctctgttgccaggctggagtgcagtggtgcagtctcggctcactgcaagctctgcctcctgggttcaagcgattctcctgcctcagcctccctagttgctgggactacaggcatgtgccaccacgcccagctaattttttgtatttttagtagagacagggtttcaccatgttggtcaggatggtctcgatctcttgaccttgtgatccgtctgccttggcctcccatggcatgttgtttttaaataacttctcttgctctatgagatgagaaaatatgtattctgtttgggactttcttactctccctcgataataaaagataaaaatttttatttttcattcactgaaacataaaaaaggcatcatgttttgtgcagactattaaatgttgattttaagatctgtgttggatggttttatatagctgtctaccatttatgagtttcatgtggaatatactaccatatcaagttttcattgtttaaacagctctactttgtcaagtattgtttacaattcaacaagaaacaagcaagcatttacaaatatacgtgcaaatatgtattcgtctgacaaccaattagtgaaattgaataagtgctcttgaaacaaacttgtttgatatcaagcttttgtgctagagtaatattgttgttttgactactttaaaagtgtttttatctggatgtggtgactcgtgcctctagtcccagctacttgtgaggctgaggcaggggaagatcacttaaacccaggagttctaggctgcagtgagctatgattgtgccactgtactccaccctgggcaacagagtgagacctgttctcttaaaaaaactttttttcagttgtggtaaaatacacaaaatttaccatctttctgagatcatttgctataaaggaatacctaagtctggattatttgggggtaaaaaaaaaaaaagagctttattagtctcatggttctgtaggctatacaagaagcatattgccagaccaacacctgcttcagataagggcctcaggaagcttctactcatggcaaaaggtgagggggaggtgtgttcagagatcacatgatgagagaaccaggtgacaggctcttctaaataaccagttcttaagggaactaagtgagaactcactccagcaaggatggcagcaactcattcatgagagatcaactcccttaatccaaacacttcccattagactccagctccaacattgggggtcacatttcaatatgagatttggaggggtcagtattcaaccatagtaccaccttaatttttttttttttttaagagaaggagtctagctctgttgcccaggctggagtgcagtggcgtgatctcagctcactgcaacctccacctcctgggttcaagcgattctcctgcctcaacctcccgagtagctgggattacaggcatccaccaccatgccctgtatttttagtagagactgtgttggccaggctggtcttgaactactgaccttgtgatccgcccgcctcggcctcccaaagggctaggattacaagcatgagccactgtgcccggctcaccttaaccatttttaagtttatagttccgtggcattaagaacatttacatttgactgggcacattggcccatacctgtaatcccagtatttagggatgtcagtacaggggcattgattgagcccaggaatttgagaccagcctgggtgacatagcaagaatgtgtctctataaaagattttttttttttttaattactgggcatggtggcacatgcctgtagtcacaactacttgggaggcagaggtgggaggatcgcttgagcctgggagatcaaggctgtggtgagctatggttatgccactgcactccagcctgggtaacagagtgagaccttgtctcaaggaaaaaaaaatatgtaattgtcaacactgtgtatcttcatacctcttttcatcttgcaaaactgaaactttttgtccattaaatacagatctagtgtcccttatccagaatgcttgggaccagaagagttttggatttcagatttttctgaattttggagaattacattatttacaggttcagcattcctagtctgaaaatctcaagtgctccaatgagctttttaaatttttttgtttcatgccaactctcacaaatttacagattttggagcatttggattaaggacactaaacttctttttttttttttttttttttttttttgagacggagtcttgctctgtcatccaggctggagtgcagtggcacgatcttggctcactgcaagctccacctcctgggttcacgccattctcctgcctcagcctcccgagtagctggaactacaggtgcccgccaccacgcccagctaattttttgcatttttagtagagacggagttttgccatgatggccaggatggtctcgatctcttgacctcgtgatccacccacctcggcctcccaaagtgctgggattacaggcgtgagccaccgcgcccggccaaggacactaaacttctaactccccattatctcctctccccatcccttgccaaccacaattttattttctttctctgtgatttgccatggtgtcggtacctcatagaagtggaatcaaacagtatttgttttcttgtgactggcttatttcatttagaataatgtcctcaaagctcatccatgttgtaatgtgtgagaactcgcttctttttaaaggatgaataatatttttttgtatgtatgtgccacattttgcttgtccattcatctgtcagtgaacacttgggctgctcctacctttttagctattgtgaataatgctgatatgaacatgggtgtggaaatatttattgttttgtttcgttttgttttgttttttaaatgagagtctcgctctgtcaccaggctggagtgcagtggcgtgatctcggctcactgcaacctccgcctcctgggttcaaatgattctcctgtctcaggcccccgagtagctaggactacaggtgcacaccaccatgcccagctaatttttatattttttagtagagatggagtttcaccgtattggtcaggctggtcttgaactcctgacctcaggtcttgaactcttgaccacctatctcgggctcccagagtgctgggattacaggcatgagccaccgtgcccgtccttttattgtttttttttaagacagggtctcatactgtcacccatgctggagtgcagtgacgcgatcatggctcactgtagccttgaccttcagcctctggagtagctgagactacaggagtacatcaccacacccaactaattatttatttttggtagagttgagtctcacagtgttgaccaagttggtctccaattcctgggctcaagtaatccttccacctccacctctcaaagtgttgggattacaggtatgagccaccacacctggccacaagtatcttttttaagagtctgcctcatttcctcccttactgccttttgttgtgcttagttgagtttttgtagtgacacattttgattctctttttgtttcattttatgtgtagtctacagaatttgtttgggatgattatcagagggatttcatgtaaaatcatgaagttataaatatgtattttaaggtgataataatttaacatcagttggttacaaaaaccgtacttcttttcacctcaggcctctccaactttgttattgatgtcacaaatcgcatctttatatagtgtgtgcccttagatttttatgcttttgtctgttaaaatcctgtaaaagaataaaaactggacttatgaaccaaaattttaataatagaggcttatatatttgtccatgtatttatctttgctggagaactttatattttcatacggtttttagttactgtctagttccctttcttctcaatttgaagaatctttggtcatttcttgtagggcatgtcttatggtaatgaactttctcagcttattaatttcattaatttaaaatttgggaatgtcttaattcttccctcatttttgaattaaaattttgctggatatagaattctcatgtgatagggttttttttttttttttttctttcctttcagcatgttgaataatgtcattctactaccttctggtctgcaagtttctgctgataatcttattgaggatcccttgcttgtcatgattcagtttgatcttgctgctctcgaaattcttttccattgttttttaccttaaaaatttgttttttgtatagacaggttcttgctgtgttccccaggctgttcttgaactcctgtcttgatccctccaaagtggtgcaattacaagcatgagccactgtacctagcctgtcttttacttttgacattttgaatatgtgtttccatgtgggtctctttggttttttttcctatgtggggttcattgagtatcttgctatcatatatccatgtcttcaaatgtgggaagttttcccccattattttttttgaaataatctttctgttccttttcctctctcttcttctgtaatgtgaatattgatttgcttgatggtgtctcataagtcccttcggttctgttaccttttctttattctttttaatttttgcttctcagactggattatttcaaataacttttcattaagttcactaattctttgttctgttattagagactgcttttgtactcttctagtgaatttttcaattcagttattttttcagctccagaatttgtttcttttcttccccccctccttttttttttaaactatttctatctctttgttaatattctctatttatgtatcttttttctgatttcatttaggtctctcctcccccccaccacctttctttagcttattgagtgtatttaggacagtttaaaagtctttgtctagaggctgggcatggtggctcacgcctataatcccagcactttgggaggccaaggcaggcagatcacttgagatcaggagttcaagaccagcctggccaacatggcaaaaaccccgtctctactaaaaatactaaaactagccgggtgtggtagtgcatgcctcttatcccagctactagggaggctggggcaggagaattgcttgaacccaggggacagaggttgcagtgagccaagattgtgccactgcactccagccagggtgacagcataggactccataccaaaaaaaaaaaaaaaaaaggtgtttgtctggagctgaaagccattatcctaactgaactaacacaggaactgaaaacgaaatactgcatcttgtcacttacaagtgggagctaaacactgagtacacatggatgcaaagaaaggaacaacagaccttggggcctacttgacgatggatggtgggaggagggtgagaatcaaaaaattgcctaccagatactgtgcttattacccaagtgacaaaatatctgtacacacgcaacccctgtgacacacaatttacctgtttaacaaagctgcacatgcactcctgaacctaaaataagagttaaaaagaaataaaaaccaaataccccaggaacttgtctttaacttttgaactgggccagacaaccacaatcacaacatccttgaaaacagctgaattatgccagcgcctccaccggtgataattctttcagaacaacaacaacttgttttgttttgagatggagtctcgctttgtcacccaggctggagtgcagtggcatgatctcggctcactgcagcctccacctcccaggttcaagcaattctcttgcctcagctcccaagtagctgggattataggcacccaccaccatgcccagctaatttttatatttgtagtagagacggagtttcaccatgtaggccaggctggtctcgaactcctgatctcaggtgatccacccacctcagcctcccaaagtgctgggattacaggcatgagctactgtgcccagcctatttctatactttatgatatttgttcaaagtcgagcacttaaatagccagctgttctaatctttgtggactgattccatgatgggtaacatcaggagtatcagcctggtgtgaaggcttaaggtcttgttgaccttttctgtgtttgtatattcactgggcctatgtgaacacttttccccagattcctgggatgtatcagtgcttttagctgccttgatctaagagtggcatgttagatgttctgttgtgttcctctgccctttgtcttttgtccctctagcactggcagatcggtgacatccctgtagctctcaactaagccactcttcccatccgaactttgcatcaggtgaaacagtaatcagtcccatgagcagcacccccagacaagccagaacgatgcaaacaagttccactcttttccttctgtcatgatggagcatcttagaattaggtggattcctcccaacttggcctcaatgaggagggattggagcaagggcaacctctaaatatacatacatatatacattaaaaaaattttttctgtggctgccttacaaattattgttctttattttaatattttaaaaaatttcctatattgttttgagtgtggctttttctcgatggggcatttagttggctgccgcagattcttaactgcttgagagagtttgcgtctggttgaaattattacacagttgagttggcagcttctttcacactgtgatccctcccagattctgccggcttccttccctgagggcccctctgagatatagtcagggatagcttccctggactctagctggagaatgtgagtgcttacaaagctcttcttgctactgcttctactttcatattccgcactaaatctgctttagttctaggtaaggttaaatccttctcctgtaatctggattttcagttttttcagtgggaatgtgtgttcggaggcgggttttcctgcttttacacttggggaactcacggtttctcacctgtcttgtggaatttacagcggcgtgccacttcttttagaggatctgtggattctttctgttttcccgatatgttcctatggtggttcttggcacaaaagtccatggtgtgaatctccacatgttgttctgtccatccaagtgggagctgcacgttaatcctgtctcctatccgccatcttcctccctactttttgttggtctggacagggagcttgtttgttcagtcacaaaagtttattctttgtgaatcctattggcttctgttctccagttctccaggttcttaccggtttcttgagtttttacaaaggtactttggtcggtatgttgttcacttggtgttttcattgggtgatgtggacctggatcatcgtagtctgttatcttggtgatgtcctgtgtttttgaagcagatacacatgtttttgaagcaaaaagtgtcctgctttatgaagcagatatgcatcaatagaatttttgctacttctcttatttcaagcattttattgcagtgggatttgaaatgtgcactaattatacagacttggggaaaaaatttctcatgaggttgcaggtgcctctaagcaatgtgaatggaaaaccattttagggtcacaataaaataatgtgccatacctgtggaaatatggaatagtaaacgactgtcccgaaacccttaggaatgagaatgttggatttttttttaagacaaaaacttaaggatggataatgtaaatgtttaataattaaatagcaagaggtaaaggaggaaaacttttagttctaatatcaatataggccagtgttctcaaacttttatacttcaggatccctttatactcttaaatagaactctttgggcttctcaatcctatgtgcattgtatctactaataaaaatgtctgccacatacccatgtgtataagcatagtttatccttctttcaagtaaaatggcattgcaagaaaaagtggctagttcagtttataactctaatggtgttacaagtgcttttccttagtactactaatttacctctgaactgttttatgtcttctcacttgatcaatacagtatactaaaaagacatgctaaattttgttagtttactgttttatttatataacattctttaaatgaccaaattatagagatggaggataaatttgtggttgtcaagggagaggagtgaggcaagaaggaagatatttgtggctattaatagggtaggtagggtagggtaataccacagatccttgtcaaggaatattttgtattttgactgtaatggtggttatatgaatttatacatgtgataaaattgcatagaactaaatatacacacagatgtgcatgcatctgtagtgaaactcaggaaatctgaataaggttgatggattgtatcgatgtggtttttctggctgttgtactgtactgtagttagatattaccattagggaaactagatgaagagtatatgggagctctgttttatttctcaaattccgtgtaaatctataattatttcaacttaaaaagtgatacattctgttacagaagtgacattcttttgtcaattacctgtagaataagaaaaattgaaaagttaaataaagaagtgacattcttaagaactggcttttttttttctttccttttttttttttttaaaaaaagtttaatttgtcgtgaaggcttagggatgaagaatacaatgactatcattgccttggttttcactaagtatatgtaagatttacttagtgaaatctcagatttcctgagtatatatttaagatttactagtagctacatccaccttgcttttctatcattgttgaaaatatcagcacaggcctgtgacatcttagtatttattttacgaaaatatttcacctcccacacctgctttaatagcattacagagatgcccaggactctgtggaccacactgtgataatcagtagcttaaagcttcagtctttattagctgaggaaaacaagtgctatgcttaagactgtgtaggaaattcagtgataggtctctgtcactgtctccagcgttttatattgtggtcttgtttgttggatattattgtacttctatgaaagtagagttgcagaagtttagagtgatataaaatatagaactcataaaagcaaaacatgggaattaacagtttgctatacctgtgttgtgcagtatgttagccatgggctatgtatgtggctatttacattctaaggattaaaatgtatataaatacaatttaaatggaaatcagtggttatagagtttgttttttgcaagaagaaaaagttctagacatctgttgtactatgtgcatatagttaacagtactgtatacttagtggttaagatagtaaattttgttacatgttttcttttttcttttctttttctttctttttctttttcttttttttttttttttttgagacagagtcttgctctgtcacccagactggagtgcagtggcactatctcagcttactgcaaccttcgcctcctgggttcaactgattcttctgcctcagcctcccgagtagcagggactatgggcgcacagccatgcctggctaatttttgtatattggccaggctggtctcgaactcctagacctcgtgatccgcctgccttaactttccaaagtgctgggattacaggtgtgagccatcgtgccaggccttgttacatgttttctaccacaaaatttaaattgaataaaattcatttaaataaacatttattttttcagtttcatcagtcacatttcaagtgttcagtagccacatgtggctaatagctaccattttagagagagtaaatatggaacatttataattatcccagaaagttctatttgcattggttgtgtagcacttaagaagacagttttcagctgggtggggtggctcacgtctgtaatcccagcactttgggaggccgaggcgggcagatcacaaggtcaggagtttgagaccagccttgccaatatggtgaaaccccgtctctactaaaaatagaaaaattagcagggtgtggtggcacgcacctgtagtcccagctacttgggaggctgaggcagaagaatcccttgaacccgggaggtggaggttgcagtgagccgagatcgtgccactgcactccagcctgggcgacagagcaaaactccgtccccccactacccccccagcaccccccaaaaaaagaagaagaagacagttctcaagaggttgaaggtacttggtctggactttaaggtgctatttttgtttctctggccagatttaagtgtcaaacatttgttaggtgaacgagtttctctcaattaatttgtaccctataatatctactaatgagaatgaacggggctggatgtggtggctcacccctataatcccaacactttgggaggctgaggcaggaggattgctagaagccaggaatttgagaccagactgggcaacattggcaagaccctatctccacgaaaaattcaaaaattagtcaggcattgtggtatgtgcctatagtcctagctacttggaggctgaggcaggaagatggcttaagcccaagaggctgaggctgcagtgagctgtgttggtagcactgcactttagcgtaggtgacagagcgagaccctgtctccaaggaaaaaagaagaaaaatgaataaacacacttatatatgcataaagagaagtttataaagagaaattttaaagcaaaattaagaacttgtataaattaataggaatagcctattttaaaacttattggtatagctatgtagtcttattcagattttaagattttaagtctttaccagctctaagatgatagagatagatttgcatctagcccctttacaatttcaaattttacattccaacattgtaatcaatctggaatttcttttggtataatgagttgaggatggttaaccacctttcttctaaatgattatttagttttctcaacacaatttattaattttggtatttttctattaatttgaaatgtttctaatacattctgcatatatgtgggattatttcagcattctctgtattactcattccatgtcattaaatgttcttctgtatcttttttaatgactgcaaaggattatacactgtggctgagtaagtgcttcttacatctatatctctttattgatttaataataaatttcttaaagattaagtagccagggcgcagtggctcacgcctataatcccagcactttgggaggctgagcccggtggatcacctgaggtcaggagtttgagaccagcctgaccaacatgatgaaaccccatctgtactaaaaatataaaaaaattagccgggcgtggtggcatgcatctgtaatcccagctactcgggaggctgaggcaggagaattgcttggacccaggagggggaggttgcagtgagccaagattatgccattgcactccagtctgggtgacagagtgagactccgtctcaaagaagaaaaaaaaaaagattaaaataagtgaaacagtcatctatcttaggccttatttacgcacatagcccacagcacagtgttttctttgtgctagatttctgctaatgctgttgatttaatttttattatcaaaaattatttagaactctataaaatagcagacttcctactggatattctggtttgctttgtattttgtttgtttgtttgagacaggttctcactctgtcgcccaggctgaagtacagtggcacaattacagctcactacagcctggggtcaagtgatcctccagtcttggcctcccaaagtgggattacaggcatgagccactgcacccagcttgcttggcatatttgtatttcatgcaggagaagctggaggacagaggttttctttattaaatttttattataaaataatcctactgaacattggaaagtaaaaacataatacagaagtatataaaataaaacctataagttgtatcctgtacactctttataaccgtctctgaagtagtcaatttaaaatttgctacatattttcttaagacatttatcttccttggttgttgtgtgtactatgtgcatatatatagtttttaaagttaagacagagtctttttatacttaaaaattctacaatttgcttttgtcacttaatattattatggacatctttccatgatgtatgttgacttgattcattctaaagattattctaaattctctcagtgactaagtacataatctcaccttttttatatatagacatttagaatatttccagtttttttgtttttgagtgtgttttttttttttttttttttttaaggaggggcccattgtgaatatattcacatagtgagctccctgaagtggaatcatagaatcaaagggataagcatgtttaaaatgtggtcagtattaccttacagttttttgttttgagatgaagtttcgcttttatcatctaggttggattgcagtggtgcgatcttgtttcactgcaacctctgcctcccgagttcaagcaattctcctgcctcagcctcccaagtagctgggattacaggtgcccaccaccacacccatctaatttttgtatttttagtagagacgaggtttcaccatgttggccaggctggtctcgagctcctgacctcaggtgatctgcctgtctctatctcccaaagtgctgggattacaggcgtgagccaccacacctggtaccttatacctctttgaaaatttggcagcttagttttttagtcagatttatgtttgttcacatacagtgtgtacaatattgagtttaatctttatggctgaatttagtttaggtgatggcagaatcttaaaacgagaaatggcatttcatctctgacttatatgtaaagtacttagaatagtacctgaaacctagtaaaagctgtataaatgttttatgttataattatttttgttagcttatgtccattgtactacattgtgaaaataggaaatacagattaattttttcacatgtctatggtttgaaaaccatcacatctggagtcttgttatacttgatatgctgtgtttgttttgtcttataatggaattcaccatttctgcctgtggttgactgtccaaatcactgtttttaacatcatcattagagatttaagggttatatgtacaccataaggactgttctcattggcttttcttcagtaacattattaatttacatcatttgcttggtttgctgtcactattgtgttcttatctccccaacaaataaaaagcattcaaaaaggtttattgaaacataaaattaataatgaaagtgagaacagatgtctgtaactcatcaacttggacagtatactggattgcagagtaaattctgtatgttcacccatatgtccttgaagaagtaaatatttgggatgactttgaaattattcgaaaagggaaagtacaaacagatgctctgattattattgaaatgatccttcattgatctgtccctagttttctgtgcatttgacatgaaacatggtcaaagtatgttcccactgaaattttgcattgtttttcaacaaagcatggtagtaaattaaggaaattattctagaataagtcattaaatgcagagaagagatcaaaagagtagaggcatcttttacagttgcactgcttacagcaatgataggtaacaagtcatactgttcctaagaagtttctaaaggcatccacagagaatggaaaaatgctctgaacgatcgttgaatgatctattggcaaaatttctttgtcatgtgccaccgttaagcattccatattgctagtggtataatggcatacattgtgacagaacaattacttgcatatgtggctgcattagagattgtgctttccatttgatgaaagtacttgtgtacagagtctgaattagctcttggcatatgtgcaatgtaaatataaaaagaagtactagatttttattttttaagtctgtttagagtagaaagcctatatagaaaataattctttgttttttttagtaatcactttcagagcaatgatataatctggaaaaaggcacattgggaacattgttgacagagccccagcaatatctgtgatcaggaagggtgttctttctgaacaaaagaactttatctttgaatgccaattcacatattgcattttcagttggctctatgttcccttatttggcttgagtgttgaaaatgttgttaaaattttgagtgaagtcaaataaggttgtcatgtatatttttagcatcttcaatgaaatacagtggattccctttctatttcaatagtacgacagctatgagagaacaaagtgttcctctaattgaagtatagaaagaggtaacatttctttatgtttttgtaagtgatatatttcagtgttatatttagtatcttgacagctagaaactcctgcttcagaataccaccaaattaaatgtgaatagtgtcaaaatatatcctaagatcaaagagcctcattactgagaaatgaccttatgaatacttgatttttttaaatttaatgaagaattaaattggtgctctcttttaaaactatattcagattctcaaatagaagttgaagaaatactttccctatctcagtggagccagaattaataagaaattcattccctgtgttttcttaagttaaaatagtcaaactttcagcctttcagatttcggatgtgatacatacacataaacgttgtgtctgaaacagtgctgaaactaatccatgataagaaaactttatttttagatcctgtttgacccatttattaattatttgatagacatgagatactttgctgccatatttttaggttagtggctagatttagtagaactagagtaggaaaggaaatcaatctgatgttgaaccttagtgtcagctacagagatggctatattaagattaccacgttgaaagattgccggatagcctctgtgtctaatatgaagccattaattttgttttttataactcattaaaaaaaagaaaaagaaattttgttttgttatttggaacgtatgatgaatcctgtcaagtatttcctttaaaattggtgatcccagctaaacgttaaatggtcaacagatgctaatactttctagatatattatttactttgttatcttaggtaagatacttaaatttttcagtccttggtttcctcattcatagacgtgggatagtgataaataaaggtgatttgggaatattttatctcatttaatcttcacaaactgccttgagaggtaggtgtgttgttcctttttacattcgtgggaaagataaatgagttgcccaaactaacaacagtgttcagtagcaattgttaggatttcagtccaagtcttgtggatatgtccattgttcttggtggcatttcattttaaatacgttacaagcaatttttttattcagtagcacacagtatattagtctataacatttggcatggatttacaatgaaaagcttatgtttttatcttcagaaaatatatggtaaatgagccgtgtgtattacattatcacttattctaaggttttatataaggttcttattggttattgatttttatgggatcatgtaaaaggattaaggtatgtaagctttggcaagattacagcaatatataacagttaactgtgtggactgctaattgtggctctgagatgtcttcctcaaggaaagcacaccgtagcaatagcaagttttctcatccatgtttgattttgtttgtggtttgggctatccatttcagaactagatgaattcacagtaggtcctcttagcattgataatttcaaataattgtacctagtctttccttcatctttttgtgctgccataatcgtgtatatgaatgttctggttgatgctctcaggagcgtcagcaatactgaatagagaggtaaccaccagagtcttactaggtcatgctttcctgtttctaaccatgatgatgaggcatgataaggcaatttacattggcaaatttgaaatcattgatgatcagagagcagggaaaattgttgtgaacctcacaggcaggttaaacaagtgtggagtgatcagcctgagatatgatgtgcaactcaaagatctagaaaaaaaatggcagaataatctgctctcatcctgtcagttttgtttcattgtactgacaaccttagctggcatcatggaccttgaagaggcaaggtgaaacacataggagggaaagttctgggattctttttctagcaacataatacatacttgtaaataaaatgccttaatgcacaaaaaaggaaaaatggttacacctagattttggattgctaatgtccttttatcaggagatttatggtaacttaaaaagtgttgcattagctggtaaagaagctcttgcctgtagtcccagctactcaagaggatgaggcgagaggatctctttgagcccaggagtttgagaccagcttgggcaaatatcaagactctgtctcttaaaaaaaattaaaaagttgttcaggtgctttgggaagccaaggcaggagtattgcttgaggcctggagtttgagcccagcctgggcaacaaagtgagaccctgtctctgaaaaaaaaaaaaaaaaaagaaaaaaattagtccggcacagtgctgcgtgccggtagtcccagctactccagaggctgaggtgggaggatccacttaaaaccatgagtttgaggctgcagtgagccgtgattgtgccactgcactctagcccgggtgacagagcaagaccccagttcattaatttaaaaaaaaaaaaaaagaaagaaaaggaactgtactgattttgagttactggatattgtaataaagttaaatttttaaaaagtagaatataaaccacattaataaccacttctgtaaacttttataaaacatcttgaactagaattgccatgccatattttttcaaaatattatattgttcttgccattttttgacagaccccttatccctctggacagaatgcaggtccaaccacgctggtataccctcaaacccctcagacaatgaattcacaacctcaaacccgttctccggtaagtaagcagaagcttgaaccaaattacattctctacctgtgtttgtgtgtgtagtggcttgggtttctttggcaaatatttttactggattttggaagtttgttccaaagatgatttattattatgactcctactattatttgttagctttgtattttcagaccttacctatagcaataattaaatttattgagaaaaagaagaggtggagcttttaaccctccactcccttttaatacttttctatagcatgatttttaagtctggttgcattcaagtttactttatttcagcttataatttttgttagttgtactgttcaaaattcaggtaagagtaaaatacaatgattttaggagtaaattgaatttcactaattaaattctcaaattccagtggttttgggaagcaggacttttgaatcagtgttattagatctgttctaaccatttaacagtgtgggtatatgcatgacatataccagtgagtgtattcatttattcaaatgagaaataaattgtgatacaaatgtaaatgctatcatcctctttgttcatcctttacatgaattgcaataagtactgccaagactgagaatttacacaaggttcatcctttgtttcacaaaagtatacagtggcttcagctctccattccttagaacatcgtttcctgccctgcatgattagctttggctagaaggtgcttctgtaacatctcacattgtgtatctcacatccctctttgtacctcagctctgtgtattcttcagaattcagggatatctttttgttccctgcccctgcctttttgcctggagtgcaggaatacctcattgcattagctcctattcatttcattttatgcatgaacttacaattgtttaaatataccaaagacttacttaaagaactaggagagcatagactgcaccaaaatgtaatctctttcttatcctttttctattttccttttccctgttgccctgttctccaatacctgttcttagatcctggttctccccagtgggtggaggaaccattctaaagaggtgggactttggtcctagttgcctgtttgcttgtctctttttttgctgaaatggtcaataagatgtctgatacaagttttgttatgagagtggtttggggatgtgtacacttgacttacttgggcctgagatctcaccagatcaatttagataggccctggttctaataattaaacatggaacattatggtaagctcctattgcaaagaattctttggccctctttctgtatacccccaaccctaatttctgattatcaaaaaagaaaatgaattaaatttacatggttagaactggcgcagaacctgactgaagagctgcatctctaaaccagtttttttgacagcccagcagaacagtgccaatacattgcacagacaactggaagaggaggaaggttttggaacagactcccgtttacaggtccttggctggaagaggctggataaaatactgcattgtaagcaatataacaaactgtacttcttgcaggcagtggtgcctctggcacttaatatttttgaccacatccatttattggctgatgaacagaaatgcattgattgcttcctctctgaaagtctaacctagcatggcagtttctgccaggcatagtggggaaaagaataacaaattgggtgggtgttctctattgggaattagtcaggaagaatttgggggtttagatttttctttattttaaacttgaagtgagatatccctttcagataaatttgaatttaaaagataaatttcgaggcttctttttactccctttcaattttataattgaatattaaggaggaaattgtctgtagttgtcagccatttttctgtggtcataaactcttcagatactatcctctatacaatttttgccatctgctctgctagtgaccattacccaccccattactaaaaatcacacacataacattccattacataccctaaaacaagtgcaagactagcagaccccagactactcttgcttcttgttttaggtttgattttctttattttgttatggggtttttttttgtttttgttttttgttttttttttgtgctgggagggtgaagttggggtctgaaatttggcaggattgcattttctgtttacgtcccaagttgtcatagtctagtctcatccatctcacagctgtcccatctggtgaggagaggtaagctgttacattgaggcagggcctcttcctgtggctttgtagagcagctaaagcttactccattctatttctgcattaataggccattggcaattgcgcagttttaggcttttctgttcttccctggacagctgcctttgcaatccaactggcttcaagtggcctctgtccttccttcaggttatctttgtgcctgtctttctacttgatgcttagaatcttagttaaattcatactgtggaaagaaaatcttttttaaaaataataacaacactgataagctatctgttccattttctcgttttactggaacttttaaacagcagtagttgttttttttttttaatagcctgtctaaagtagtgaagctattaaatacttaatttggagagggagacagtttggcttttgtagtaacgtaaccattgattatttttatattttgtggtgttaagtttcaaaattacatcaatgttatgttggccatgctcagttaccaactgtgcccagaaggggtgagtaagtgggtgggtggcattaacactggatccaagttcacagaaggctgctttcctttatatcaacagtcctcaccatcttaaagacccttctttaacaaaaagaaaagaaaaaagaaagaaaaatttctagttttaatatgagccagcagcgactacagtttgttctgttgcttacagctacccataggattaagactattgtcatttcaaatgaaaaactcaatagccaatggtgactagtgcaaaatagactagggtactttcctagggcactttcctactaacttaagttggggttttctttttcgcttttgtttttatatatatgtaattttataagatactcttcttgttcatagaaaattctcttttgactggaacattcaaaatgtacaaagttttagcttttattttagagccttgaaaatgggacattttctgtggaacagtgataagacaggtactgccatactcaggttaattttgtaacatggcccctctcttccattttcttcaaaagtgtcataaagaaacatttcactccactccctactttcataccacatgggtggtattgcctgttcttgtccatagtagaagtatgatgttttcttctcctaattggaaaactgaaaatacaagacctcaatttctttgaagagaaaattttctgcaagaactgtaactgccagttatcatcattctgaaaaactatattatattgattagccaagtatgatggctgacctaacataacccaagcttgtaggtcattaatgcacttttcattacttgaacaaaaggtgacattttagcttctgaggtgaattcttgacagagctgttttcagctgtctcctacattgtggccatgtgttctactgtaatttgttgaaattttaaaatgtgaactaatggtagttggggaagtaattccaaatgttttgcaaatcactattgcacataacttaaatgctgagcatgagagattgtttcttaatcttcaatctaattcatctgtagtgttaagctgacagaaggaagtctctatagaggaaataagagagccaaagacatatatttttgctccttaaatatattagataaaaaccctgtatatggtttacattaaacactgctttctaaatattttcttttactattaaagggagtggttaacattacaatagctaacgtattagtatccacaatatggctctacataccccggttaatattacaatagttaatgtattagtatccagaatatggctctacataccccaatatttttgtctgttcctttcagttaaaatgtattcaaacccaaatttggcctggtgaattgtttgatcctagaggtttagcagttaaaatttgcataggtgaaaaaactttttattttcttctgagttagtagaagagttggaatatatattagccactttcaagtactctatgatttagctgaggaattacatttctttgtgctttattcttaggtaacaataggtacatatacacagtgctttgctgttgtctatagtaattaagagatttgacttatttactcttttttcttatcaagcctataagaataccacttggattaatcatgttagagactgatgttctttactagctgtttgccttgacatgccttgtattaaattatattagttaaccgcatttaaacttaaacttgtgtgtgtgtgtgtgtgtgtgtgtgtgtgtgtaaagtcataaaagatttttctttaactccaagaaattaagatactgaaacttccatttcatggataagatatcccatttaacttaagaaaatttgcagttaattgtgttacgttttttacttcctgctggactttataattatctcctggctaggtcttgtaatgtaaaagctttctcatttcctccagctgtatcagttacatacagcatacttgattttcatgtttgtcttaatataaccacttaatttttcaaacttgcttttgccttattttagggtttttttttttttttaaataatcctatcagagagtaccttacatgcctaacagcatagcctgtttctctcccagttgataaatgacaaactattctgatagtgctgttaacctgttgaatcttagtacctgtctgtcactgtcctgcagcaaagctttgactgttttgtgtgttgttttttatttccccactgtgggttttttttcttttggcatattgtgtgaaattttggtttttgttgtggtgtttctgactctttgtgcctttccttttgtgtttgttttccctccttttctcagtttgcagcggggcctcgacctccccatcatcaggtactgtacccttgccccttcactatcacccttaactaatagatgggggctttagtagctgctgactcttagaatgctgccatcccatagaactactcaaattactcatttcaagagtagcttttatctgatataattcagctttctttgtccttcattaatctcactgcattttgttattaacaaatccatttgcctctgtttatggcacatttaaaaaatgctacagttttttttttcttgccaagcattgtttttaaattttacaattttgaaaaatttagatactaagtgtttatagattttgtggatatttgtagtaagttaaatttaactgaatgaagcaggcagcattctatgggttttctgttaacattccgatataacctgtattgatgtgtataaaatagcattagtatttctaaaaccacttaaactcagttactaacttagatctagtaataaattgattaaaaatcatgtacatccatttgctggatagaattatttttattattagaacacatagaaaatagatatcttaattaatttaaataactttatcctattggttttttaaatgaaataattttaattttttaaatgaaataatattaattctatcctattggtttcatacttctatcctattggaatctatttagaggtggcaagacagaaggacttgcagggttctccctccaaccccccagtagctttttatggggtattctgaaacattttcttctgctgaaagagctttggtttagtctgttcatattacaagctttactatgtaaccagctggttaggcaagtctttttctgcatctttgtttcctcatatgtaaaatggagataaataacctctgccttagaaatagtgtaagcatctgacacaaaacaagcagtcagtaagtggtaactgtctttaatatgattgttatggaacaaagtctggttggataaagtaaatgttaccagtatttgcctgtgttatcatatttacaattcttattactgagtaaatggatattgtttagttgaaggcttccagtgatttaatacctgactctgtttttcaaaatgtattccttccaatctggaggatgtaaaggcaaagcaaatctgagttattaaaggtactttgcaggaggatggctatatggggtggatggctattgtttgggtttcatagtgaaataaaacctcagggtattttttttaattcagagataatattgtaaagtattaatactttaagagcttggacttcgccatcagctagatctaggtttgattcttccatgttaaccaagtgttcttggataaatcatttactgctctccaccttagttttctcacctgtaaaacggagacagtaataccatgttgaaactattatgaaaagtaaattagataatgaaaataaaatgattagcggggtgtttggcacatagtaactaggacatagaattagtattactactactaataataaaaatattagtttcttatgtaaaagagtgtttataattgaaaatttagtccagtgccatagaagcatggcttaaattttaatccagggacaaggcaaatactcctaaaagagagagacgttggggatctttactcaagaagcagagtgaaaagaaactatttatttgagaaataactgcaaaggaattagggcaaaaacgttttctgatctcctttatgtaaggcacctgttaatttctttgttcacatgcttgtgtttttcaaaccttggtttattttcataagtcatttcagataagctagcctaaggtaaactgttagtagaaggaattaacgttaccattgaccacaattattttggtggattttatacactgtagattgatggaatgatgagtgaattttgaaacaaaaacagtattgctgaataggccaggtacggttgctcaaacctgtaatcccaacactttgggaggctgaggtgggtggatcacttgaggtcacgagttcaagaccagcctggccaacatggtgaaattccgtctctactaaaaatgcaaaaagtagccgggcgtggtggtgggcacctgtaatcccagttacttgggaggctgaggcaagcgatcacttgaaccctggaggcagagtttgcagtgagccaagatcacaccactgcactccagcctgggcgacagagcaagactcccatctcaaaacacaaaaacaaacaaaaagaaccatgttactaaatagcctgggcctttcttattaagactagtaactcttttaaagactgttgatcaaaaaatttaagttcttaatgaaaatagaagaaactttaaggttatgtttctgctacttgggttcgataatagtggttctaaaattaggatattgtatttaagcatttgtagtgagctttgggaaattctgttctctaagaaaacttttatgagctttaaagttatgtggtacattttgtctttctttaattccaacaatcggggaaaatgttcagaaatctctgtgagaaaaggttgatttcagcccacattttcatgtgcagtaggactcagtaaagtgttagcagattagtcgtttaactgtatgatactgctcatgaatttatggctagttttgattattttaaaaatagaagtataagctggatgcggtgtttgatgcctgcaatcccagcaatttgggaggctgaggcaggtggatcgcttgagccccagagttagagatcagcctgagcaacatggcgaaacctcatctctgcaaaataaaaataaaaatacaaaaattagttgggtgtggttgtgcatgcctgtagtcccagctactctgggaggctgaggtaggagaatcacctgagcccaggtggtcaaagttgcagtgaggtgtgattgtgccactgtactcagcctgggtgaaagagtgagactttatctcaaaaaaaaaaaaaaaaaagtatatatgtttattatatttattatttatttcttaccaagaaacataattatcatctaacaatagttcttggaggtaagttcctaagatacagtataaattcagagcaatgatttttaattcagaaaattcaggtagctggcacttttttctttgttatcctttttttcctgaacaccagttaaattcttttcatcatatcacagagaattgaataaggatgtctgtacccttgcctcaggcagcaacagtaattaccttgaatagaggagaagaaagacatggggttggagtggcatagctgagcagggctaactgaaccggcattatgtgtggtataggataaattgttagaaagaggttgctattttgcatccacaggagatgtggggtcaatttggtttgtttcactatgggataggtattggcatttgggtgggataaccagttatcaaagctgccgtatataatacaattaatttagcatcgtttgggctttaaatgccagtagaatttccctagtgacaattagaaaacaaagcaaaacaaaagaaaaccaccactgtacatttccaaataccctccatggaaatgacagcatttcccatttgagaatcgcttactgaatctgtatttcacagtatcttctcttcagatctaaagtcaggtagcacctaaaccctgaaagatttacagaggagttgctcataatacagaacaagacatagagacttgcataatgaaatgaaagctgttggaggaaacaaacattgagtggtatacagagaatatacttttaaagggaagacactcatgtcctgggatattttgggttttacatacttaagacttaaagtggaattgaaggcagaaatggttttttcatcggtggtagtttgctttggccagtgaatagatttcttttttgtcctttattgcattattcatcagtggctgcctttctgatcactttacgtcctttcatgctttgatctcaatttattttttgaaggaatttgttgttggatgatgtttttaatgattgttgtttctaaagtccaatagcaaatatagtaactttttgttgatgcttagtaaaaattgcaaagtatgttctatagctgttgcaaagaaaaaatacaattatttaggtaggctttttggaattaattgcttgtgaaaagaaaacatcatccagtttagtaatcttagaacttaaatattttttctgtgtaagatggagttacttgaattcaagtaaacaaaaaataacaagattttaaatggtaaacattttctttgttcttaatggaatcaagaaactgctttgagtgtattccttggaacttcttttatttaaaaggtcttttaactctgtttggagggctagagctctttttgagtccccacaaatcaagtgcgccatgctccagttaggattatttcagccacatcttcttcctgatattactattagtttttgtcttttgtggagattcttcagattaataaggatgtgctattcttttggcattttataacctgaagagcttttagaattacagttttcttcaaagataaaacaagaaatactaagtcattttatatgcaaaacactcttggctttagaaatatgtcaactatttttgcactgatgcttgaaaatcccaaggtaattagaaactgaaagaacagaaagtacactcagaattatagcaagccacttggtataatttggattctggcctgtgttgtttattttgtgtatttggtcattaaaatctgtgtagttctggtttaaagttacttatgttcctgtccttattttactttggggtttcacaatagagatcaagtgttggttatatactatgactaagtagtcttttcattatgagaaagaccagggaaatagtattttaaagtgttcataggacaaaacactgtgcagttttttgatatatgattttggttcacatacttttcacaaatgctgaaaaatatgctgtattcaaagcagtgggatttagtgtaaacaaataatgagcttcataaaaccagcgtacactatcagcaggaggaggaggaggaggagtatgtgccataaagaaatgtcttacttggtggcaagcgttgaaattgtgcatgttttcctcttgtggtttggttctttttgtgaaaaagaaacttttgaaaagaactgctgatttatgtagatttctttttcattatgatccctaaaggtttctttactgaaagtttgtgatgttatattcctagttgagatatatttgtgttactataggcaatttattagatttggaaagtaaaataaatgggccagacctggcacaacagagttaaatggatatgaatagcaagccatctcaagcatctatacgaccttatgacatcttaaattatgatcttatgaactttttgttttttggagcttggtacaagtgagtgatgggtggttttatctggtatctcattcacaaggagttgtatagtagcagcataaataatgaagaaaatatatgttgggagtcagtaaaactgggattcaatttcagcttcactacaaattatctttgggcctcaagtttctgatcttcaaaatgggtaaaatatgctaataaatgatataatactgagatgttttaataactgcatatatttcctatgggtgtggtgaggataaagtacctgcctatcacagtgtctgaaatgaaataagtccttggtaggtgtcagtttcctttagcagtgagactacctgcctttccccttttcccaagctattttttagcatgagtgaagtattttataaggatgctcatttccaagactctcccttatgatctgacagaacacctcctgttcctgacataaacctctagggtagcactgtgtaatagaatttctgtgatgatgaaaatgttctgtacttgtgcttttcactgctgtagctctactagctatatacatggctatagagcactttaaatgtggctaatgcagctaaagaactgaattttttctttttttttttttatgagacagagtctcactctgtcacctaggctggagtgcagtggcacgatctcagctctctgcaacctcctcctcccaggttcaagtgatttttgtgcctccgcctcctgagtagctggaactacaggtgtgagctaccacaccctactaacttttgtattttttgtagagtcaggattttgccatgttggtcaggccagtcttgagctcctgagcttaagcgatccgcccatcttagcctcccaaagtgctgggtttaaaggcgtgagccactgtgcttgacccggaactgaatttttagtacaagtagttaagtatggcttgtggctcctgtattgaacaactcagctctagggcttccatatcccgattcttagtgaaacctaaattatataatattgaccacatgccgggaaatatagaaaaaatttagaatggaataatctccattataaattaccatggattaacagattatcaaattgacacctgagtgatgtcccattatgtggactctttaaagcttgtccctttctaacttgccagcaaatcatagcactgttcttcaagagtacttcagacttttaaaagatattcaccaaggaaatttctaattgcagatgttagtttttcatcttctagtaggctgacctatatactgaagcatattttgtattgctttgcaagttaataaatataggcatgcctcggagatattgcagacttggtttcagaccacgacaatcaagcaaataactgcaataaagcaagtcgtgaattttttggtttcccagtgtatatatgttatgtttccactgtgctgtagtctactaactgaacagtagaattatgtgtaagaaaatgatgtacatatagtaattaaatactttctcttttttttgagatggagtcttgctctgtcgcccaggctggagtacagtggcgcgatctcagctcaccgcagcctctgcctcccgggttcaagcaattctgcctcagcctcccgagtagctgagattacaggcatgtgccactacactggctaatttttgtatttctggtagagacggggtttcaccatgttggccaggctggtcttgaactcctgacctcgtgatccgcccacctcagcctcctaaagtgctgggattacaggtgtgtgccaccgcacccggctggtaattaaatactttctggctaaaaaatgctaatgattttctcagtcttcagtgagttgtaatctttttgctggtgaagtgtcttcaatgtagatgggtgctgactgatcagggtagtggttgctgaggattgagatggctgtggcaatttcttgaaataagacaaagtttgtcacattgatggactcttcttttttttaatttatttgtttgtttttgagatggagtcttgctctgtcacccatgctggagtggagtggcgtaatctctgctcactgcaatctccacctcctgggttcagttctcctgcatcagcctcctgagttgcggggactttaggcacatgccaccacatctggctaattttttgtatttttagtacagctgaggtttcaccatattggccagagtggtcttaaactcctgacctcaggtgatccgcccgtttcggcctcccaaagtgctgggattacaggcgtgagctactgcacccggccagtggactctttatttcatgaaagatttctctgcagcatgtgatgctgtttaacagcattttacgcaaagtagaactttcttttatcattggagtcaatctcaaactctgctgctgctttatcaactaggtttatgtaatattctaaatcttttgttgtcctttcaacaatgttcacagctccttaccgggagtagattccatctcaggaaatcactttttttttgctcctccatatgaagccagtcctcatttgttcaggttttatcatgagattctcatgataaagtcagtcacatcttcaggctctactttttttttttttttttttttttttgagttggagttttgctcttgttatccaggctgcagtgcagtggcatgatctcggctcactgcaacctccacctcccaggttcaagtgattctcctggctcaccctcccgagtagctgggattacaggcatctcccaccatgcgcagctaattttttgtatttttagtagagatagggtttcaccatgttgggcaggctggtctcgaactcgggacctcaggtgatccacccgcctccacttcccgaagtgttgggattacaagcgtgagccactgtgcccggcccaggcactacttctaattctagttcttttgccatttccaccgtatcagcacttactccttccattgaagtcttgaatccctacatagtaatccatgagtattggaatcagcttcttccgaaatgcttgtgaatgttgnnnnnnnnnnnnnnnnnnnnnnnnnnnnnnnnnnnnnnnnnnnnnnnnnnnnnnnnnnnnnnnnnnnnnnnnnnnnnnnnnnnnnnnnnnnnnnnnnnnnnnnnnnnnnnnnnnnnnnnnnnnnnnnnnnnnnnnnnnnnnnnnnnnnnnnnnnnnnnnnnnnnnnnnnnnnnnnnnnnnnnnnnnnnnnnnnnnnnnnnnnnnnnnnnnnnnnnnnnnnnnnnnnnnnnnnnnnnnnnnnnnnnnnnnnnnnnnnnctctcctctctttttgggggaatagggtctcacgatgttacctgggctagcctcaaactcctgggctagaacaattctgcaacctcagcctcctaagtagctgggactccagtcgtacaccactgcacccaggaatattcttaatggcatcagcaatggtgaatcctttccaggaagttttttatgtagtttgcccagaaccatcagagaaatcagtatgtgtggcagctgtagccttacaaaatatacttcttaaataataaggcttgaaaatcaaaactactccttgatccataggctgcagagtggatgttgtgttagcaggcatgaaagcaacattaatctctgtatacatctccctcagagctcttgggtgactaggtgttttcccagtaagcagtaatattttgaaaggaatctaagctctctacaatggccttaaaatagccagcaaaccatgctgcaaacagatgtgctatcattctggctttgttattttatttatagggcatagtctgagtagatttagcataattcttaagggccctaggattttccagatagtaaataagtattggcttcaaattaaagtcaccagctacattagcccctaacagtagagtcagcctgttgaagctttgaagctttgatgccaggcattgacttctcactagctgtgaaagtcctagctaaagagaagtcaatgcatgacatcttgtttcaatagatggctgtttcatctacactgaaaatcatgtgtttagtgtaggcacttttatcagttttcttggctggatcttctggataacttgaagcagtttctccataagtacttgctgcttcaccttgcactttcatgttatggagacagctgctttcactaaacctcatgagctaaactttgctagcttcaacttttcttctgtagctttcttacctctcagccttcacagaattgaaatgagagttaggactttgctttggattacattttggcttaagggaatgttgtggctggtttgatcttctatccaaactgctctttctccatatcagcaataaggctgttttgctttatcatttgtgtgttcactggagtagcactttaaatttcctccaagaacttattctttgcatttacaacttggcttttgaagtagctttcagcctatctcagcttttaacatgccttcctcactaagtttagtcatttatagtttttatttaaagtgagagatgtgacacaagaccatatagaggccactgttcagttattaatttccatataatggcctaacttcaatattattgtgtctgctgaataggaaggtctaaggagaggagaaaaatgggagaggcggggggacaacagacagtaggtggagcagttagaacacacaactttcttaagtttgctgtcttctatgggtgcagttcatggcgctcccagttacaatgataacataaaaggtcagtgatcacacatcaccataacagatataataataatgaaaaaattgaaatattgggagaattaccaaaatgtgacaaacacgaaatgagcacatgctgttggaaaaatggtgctgatagactttctcaacacaaggatttcacaaactttcaatttgtaaagaatgcaatatctataatgcacaataaagcaaagcagaataaaatgagctatgcttgtactcagagcttttccccacatgggaatatctaatgtgattaaataggatttttctagttgctgaaaatgaaaagatgtttttcagagaatttctgttatataatttgttagaggtgtttttgtcttttcatgcttttactgagcaaagtcatgaaaaacgatatttcataattgccagcacgttcaaacaccatttgttagacgtttttgatgaggaagctttgggtaatgatatgaattattgcatctttagaaggatttttcgagaggaaacattttttattctggcttctagagtgtttctgggaaagtaagcaattataagtatgctaagttcagcctctgttttaaaagtatcctatcttgttggatctgcccaaaatactgcctcaaatgagagttttcaccttcctctgccatccttctggtgtattaataataaatccttgaaagatgaaagaagtaaaacagattgaaatgaagtttaggaggtgaattttatgttgtacatggctctcttttctgtgcctagctctttgcagcatttttatcagttacttggataagtgacatttatgtcaagttttcttttttttttttttttttttttttttggagacagagctctgtcgcccaggctggagtgcagtggcatgatcttggctcactgcaagctctgcctcccgggttcacgccattctcctgcttcagcctcccaagtagctgggactacaggcgcatgccaccacgcccagctaattttttttgtatttttttagtggagacggggtttcaccttgttagccaggatgggtcaggttttctaatgatcctgtagtttgacactgtcatgcagtcggtacaatctgaaatgatggcttgtttagccagataaattttcatagttacaaactacaaaatcctctatatgagcttcaaaacacaattgtaagagtacacactgaagtgaagaacacagcttatttagccaggttatgtataaagaggatttaaatgctttaaatgagtgtcagtaccaatcagtagtaaaatatcaaaactgctcctgtgattcttggtttcattaatggaattggagctggcaggaataagagaggtatattgccttttcactcagcaacaaatatttttttagtgagtgccaggtacattctgggcagaccccacctcgatacctttgtgttggaacaagattgaaagaaaagatcaagctcatttgggaattaaaaatcttggttggagggacaggatgctagggagagggttatgattgacttgaaacaaaaaatagtggtgtgaaaattggcagtaatggcagcgttcacataacttagtggtctgttgctgatggagaaggatttgacatctgtgtggttttagggatggacacgagacaagtggataggtgatatagggagaaaaattgggggccagtagaaggaagagttttacagtattagaactccatttaattatgaaaagaatttgtatcttaagttgctgaagtttcttatccctagtggtatattataaaagatattcagactttaggtggatggtgagactaaatggctccttccattcaggagagtttgactcttaatgattgttcatcactcagttgagaagaaaagaaatttgaaggattgcaagcagtttgggaaatcccatttatatattccttttaataacctatggattactgctatgcttgcccaactgagaatctgaatttcttgcattactattaaatctaattatgcatttgtaattgaatggtttggaaggagtacaaaaaggatatatatttttttttttttttgcatttctagtcattacggcttttctagaatctcttctggtgcacgtgtgtgtgtgtaagtgatcctgtacttttaagtggaaaacacaagctccagatagactattgttgtaaaaagtattaatgcagtgaagttgagcaaaagtaagtctgtaaaatggtatgccaaggatacgcttttagcatatgaacaagtttcagtcactttttgggagatagagaattggagttgtgtaggtagaagaaatttgttttcgtgagtaagcatgtgttttgtgaagtaacttgatggaaaatttttcttaccaggaatcagtcatgattgagggacatgccacccgttagtatagttggataaagatcctgctacatcctttcagtgtttgtaaagaaaagatttctgctggtttatgtgaaaatatgggggtattccatttcatgagaggtaatatgtgtaacagttaaaagtacatgcctataatctgactgtgttttagttacagatgggggaggcttccagcaagttatttaatctccctgttcctcagtttttacatatatcttatgacctgttaataatagtacttgccttcaaggtcatttatgagcatgagttaacatatatgttgactgggcacggtggctcacgcctgtaatcccagcactttgggaggccgaggcgggcggatcacgaggtcaggagattgagaccatcttggctaacacggtgaaaccctgtctgtactaaaaatacaaaaattagctgggcgtggtggcatgtggctgtagtcccagctactcaggaggctgaggcaggagaatcacttgaacccgggaggtggaggttgcagggagctgagatcttgccactgcaccccannnnnnnnnnnnnnnnnnnntccagcctgggagacagagcaagactccgtctcaaaaaaaaaaaaaagtgtatatatgtgtgtgtgtgtgtgtgtgtatatatatatatatataatgcttaggttggtgctttacaaatacatttctctttagcttcaaagctgaattcttagtgtataaaaattagtatattggccaagcgcagtggctcatgtttgtaatcccagcactttgggggaggccaaggtgggcggatacccaaggtcaggtattcgagaccagcctggccaatatggtgaaaccccgtctctactaaaaatacaaaaattatccaggtgtggtggtgggcacccatagtcccagctagtcaggaggctgaggcaggagaatcgcttgaacccaggaagtggaggttgcagtgagccaagatcagccactgcactccagcctgggcgacagagcaagactccatctccccccgacaaaagaaaaaaaaattagtatatcaatataactacatatttagtggctttttttggttcagctatatgttaatattaggaatatcattagaaacactgtttttacttcaaagttactgaggaaattagtttcatactgttcagaaacctcattgaataagatgtaacctcagttattctggacaggctggttaaaagttttatcagaacagctggaaaatagtggtaagaaaatatttcacatacagactgttaaaatttttggaaaacattgcccgtatctatttttcttactctgcataagttaatggattcattttctttctcctctccttaccaccccgtaacaccctatttcttcaggcaacataggagtattttgacattatttgatgatagtgttaccataatagatgatcacctgtgttcatttgatacgccctttatcttggctgggctgccctctacagttgatttcaaaggatctttcagtattaagatttttatcctctgcctgtgttatttagcaatgcccagtaagttgaacagataatgactcttctctacttgaggcttgtatcattcttgtggctcctgatattaactacattataaaaatacttaagtttgttcctgaagtgttgtttacagatcacatgcattgatgcatgatagattctgtttgctttgtaattacgagaaatgcagtccagtaatgggaggtttactgctttattgttccttttagcagccaacaaaaaaatgttgtcaccaaaactgtgtcagtggagataactagaagatggttcctgtagttgtattgcatcccaggttcctatgttaccaactttgcctcctgtgctttcttttcatctccatcacctactctctgtggcctgcccctttggtttcccccatttattccgttctcctgctatacctttctggctgttgtttttctgtgacttaatttctttagggctatctttgccatggggtaggaaggctgaatggggatgagccttggacactagatcccagttcttccttttgagcacaagatcaagttacttataccatctgtgggtggtttgatgcctaagagtaggacaaaataagaccagagtgggcccaaaggtcgaagcttggctttatttggactgatagcaacgaatattttgctgctttatttattttggtgcaagaccacattttaagattgttattatagttctccattttagagctataagtgccctcttatatacctgattagttaaaaagagcaagcaagtctctgtcattaagagtctgatatatattgaaaagtttatttcttaggacttttacaaaaataacaaatgacacagatggcaagtagatcacagagatgctagacaatgccagatcatgaaatgggtgatcatgagatccaagagtaagaaccagtagtcacaactgtacttgtgccaccaagcagacatttccttgcacactactataacttgtggctattaataatcatagaggatttttgccactggatttcagttaaatgtaacttgattctttgattctatgtgtggttaaattctcaagtgaagaactgtcattctgattttctagtcttctttcttctcctattattactaaatagaaagatatttttgttgagctgcatgctatttcctgtcccttccaactgatctgtaagcttttccattggctttctttctgtttcctgctgctttcttgcttcatatttgaagggaggattcagacctatccaggtaacaaactactggttctgcatggcctctttataactcagtctgcttattattacattgagattgattgctaatgaatggatacattcacattggaaatttactattggtatattgtttcaaggcttttaatcttgcagtgaaaattataactacaggtactggttgccattttgagaaatttgaactctgctgattccagaccattcttaggcctgtctagattgtccacttttattgcaaactattctagaaggctcagtttagtatgggattgtgccaccttttggagaggaaaaaaactgcttagttcagcatgtgacaaccctacagatggtttaatttagcttgaccctgatggactgggtaaatattttatgatcaaagagattccttgttcttctaagtattttataaattacttgaacagcagtcttttaggaggctacttttaatttttaatgatttgataatgaaccacttactctttatcagagtcagttcttttatataatagagaaatatcaatattagctaccccttttgttatactttattatacatatatgtatgtatatatacagtatgtgtgtatacatatatgtatgtatatatacagtatgtgtgtatacatatatgtatgtgtatatacagtatgtgcgtatacatgtatgtatacatacagtatgtgcgtatacatgtatgtatacatacagtatgtgcgtatacatgtatgtatacatacagtatgtgcgtatacatgtatgtatacatacagtatgtgcgtatacatgtatgtatacatacagtatgtgcgtatacatgtatgtatacatacagtatgtgcgtatacatgtatgtatgtatatatacagtatgtgcatatacatatatgtatgcatatatacatacgtatatatacagtcgggtcgaaaccaccctactgttttcaaatatgtgatgatactgataagagcttgccctagtgtggtatatttttgggaacccagcaataggtaatttattctttttatgcatattgtatttgtaattcaagttgaccagatttttattagtgaagaaaaggagacagtaaaatttatatattcccctgtgttaaaaaaaaaaaaaaattttttttttctccccttcccagtttttccagaggcctcaaatacagcctcctagagctaccatcccgaacagcagtccttccattcgtcctggtgcacagacacccactgcagtgtaccaggctaatcagcacatcatgatggttaaccatctgcccatgccgtacccagtgccccaggggcctcagtactgtataccacaggtaaagtatctttgaggcctaggtggtccagcaatagagtggaaattaacccggattcacatcagagggagctgggtggatgaattgtggtattagttttcggtgacgtgtgaactgttttgttggttacaaatctagcccttttgtgatttttcattatgctgtgtgaagatatttctacatctgtttacttaaaattttttaaaatgataaattgtttttatctacttgctttctcccatccctttgccacaaccaactgctctaaaatggactcagtgattatgctgttcctgaaatcctttaatgtcattgaaaagctactagcctgagattattttacagtgagctgatgtctgcctgtgcactgatatgttgtatggctttactaagctgcacctttctcttcattctcattgtatcttgatggcaagcaagcatttttaatgtgtttgacccaatcgctttacctcatttaaatgattctcttacacagagaactttactttctgtagtaagctactttcttattattttattatgtttttcgcccccagataccatattatttataaatattcatactttctcttttctagtaccgtcatagtggccctccttatgttgggcccccccaacaatatccagttcaaccaccggggccaggtcctttttatcctggaccaggacctggggacttccccaatgcttatggtaagtaggaaaagtcaagacatttctgctagttttttgtgtttatttaattttgttgcttggtgggttggtttatacaatgaggtttagtggtaagaaggatttttaaataacatgctgctaacagttctttcttgaaagctacttttttttttttcttccagaaatgggagtctcattatgttagtcaggctggtcttaaactcctgggctcaagtgatcatcctgccttagcttcccaagtagctggacctactggcacatgccactctgcccagctttaaaagtaattttttggctgggcgcggtggctcacgcctgtaatcccagcactttaggaggccgaggcgggcgaggagattgagaccatccaggctaacatggtgaaaccccgtctctactaaaaatacaaaaaattagccgggcatggtggcgggtgcctgtagtcccagatattcgggaggctgaggcaggagaatggcttgaacccgggaggcagagcttgcagtgagccgagatcacgccactgcactcagcctgggtgacagagcgagactccatctcaaaaaaaaaaaaagacagaaaagttactttttagagagtggcttacaagaggagtattatagaaatatatttagttaatgacatcttctttacaagctgatgattctactggaaagaatcatgtttcagagttctgacatcttccaccagttcactgttacctagatttttactggatttttgccagtggcatgaatataccttatcctcctttcacaatctctttttctccaaacatttcctaccaccttacaccttaaagattttgttaatgtctttcttagtagaatgcaatttccatgaaagtagagatttttgttttgttcactgctatatccccagcccctagaacagtgactggcaggcacttggagaatatacatgccataactaaatataactcagtgaacctgtgattctccgcaaaattgtgataagatctatggcatgggggaggttttgggtattagttccaatgaaaatgccttgaaaaattaaaagtgtttttaatttagagagagctgggttgccaagattattggcatatgcgccaatgctgaactaaaaatgataaaaattacttacttcattcaacaaatttttacttcatattacatttctcttattccatggaaggtgaataataagggataaaattagtagatactagaaaaattaagttttgagattcagtaagcattgatctgttatataaccaacaaagcaaaaacttattaaataatcttaatataacaggataacttatccattaaccagtttcctaaaattgggattgtctcagttaagattacagcagaattgatttgattcaagtagcccaagaaggtttttttttttcagttttgaggtgaagtaggcaaagcaaccaaatgttacgtggctttacttcttttagagaagggaaaagttttctgttaccttggttgatattgtcttgggaaactgctatttcaaagtgatacgcaatacccttcacttatcctcagggaatacattccaagacccccagtgggcatctgaaacctcacatagtaccctatacataccatgggtttttttttttttttttttgatctgataaaagggctactaagtgactaattggcatgtagcgtgtacagcatggatacactggataaagggatgattcacatccctggtgacatgaagcaggacagtgcaagattttatcatgctattcagaatggcttgcaatttaaatcttatgaattgttaatttctggaatcttttgtttagtattttcagactggttgactgcaggtaactgaaattgcagaaaagggattaatactacattttatataacctcactaaatgtctcaaatatgtttatttaactcagctttattaagttgtatcattactatgaaatttgatattttcagaacaataatgtgttacatatatgtgagtttaaaagttacacaatatatatatatatcacccaatttttgacagcatattgcaagtgctgttgaagtattccttgtgtaatccttggacttacctttgtcaccatttttatgtaattctagtgcctttattctaggtccttattctgaaaacttaaatccaagtaattatttttgagagtaacaatggttgttactatctagaattttttaaatagaaaacaatgggattattaatcagcatgaacatgctgaaatagacagtgtctcccgttaatttctgtgttgcaaagggaatacaattagtcttctaatttacaacatcatttttaaagatgtcttactgaattgtaatctgcttttttacttagtgattatgccaatcactttactcagaaaatgtcatcattaaatttcctgctgtaagtctgtgccagccctctttattgcttttaatactattgtacaatatgtatagaaacagtaatgatgaatttactagtagagacataatgtgcagatttgaatgtacaatattataacattttggctttatttctattagatatataccatttttattcatttttatgaaaaagcagtatgttgaggtataattgtatctcagatattattgatgtctgttccctttcatagatatgctttcttccccagtaaattctcatgcagatccagtagacatcaagtgggcagttaatcatctagattaaaatattgtttctctagttttcttaatattagaaaaacaatcttaaaataatttatttcattatgaaagtaactaaattaatgataaaaatttaaaaaggccgggtgtggtggctcatgcctgtaatcccagcactttgggagaccaaggtgggtggatcacccgaggtcaggagttctaaaccagcctggccaacatgatgaaaccccatctctacttaaaatacaaaaattagcagggtgtggtggcgggcgcctgtaatcccagctactcgggaggctgaggcagaagaattgcttgaacccaggaggcggaggttgcagtgggcagagatcatgcccctgcactccaacctgggtgacagagcgagactccatctaaaaaaaaaaaaaatttcaataatatagagtgcataaagttgaaatagccagtttctctcccttcccatcctttaaagcaataacatttaacagtttgatacgtattttttttttcatttatatttaacaagtttttttaacttaaattaacatggaatatttatagtagtgtaaataataaaacttcctggttattgttttcctttcatactatattcatgggcatctttctatttcattatctatagaacttctctcatttcttttaaaatatacataatctatttttggaatgaatcataatttatgatacctaatttttagtactttagtagagatggtgtttcaccgtgtaccaaggctggtcttgaactcctgagctcaggcattctgcctgccttggccttccaaagtgctaggattacaggcatgagccactgcgcctggccatgtttattattgtttctatggaaaattcaaggttttgaattttttttagaagacaggcagtgtgctagttattttgtggaatacaggtgttaagatactcttcctgccattcagtttcttatagtaagtctgttagatattgtgcttaggtttaaacagtgagaagaaatctaaatattgactgcaccattggtttcacattatagacaagtaaaatgaataaaaagtagagtaaaataaagtagaaaacatacatgactattaaatttataatttggccaagaagacctttaaagaaaactgccgtttactgccagtatcatttcatgttttaacaacaaaaatcatcaaataggagcagtcctttatacaaattttaagttgttaaacctctgtgtgacactggggcctgttgtggggtggggggaagggggagggatagcattaggagatatacctaatgttaaatgacgagttgatgggtgcagcacactaacatggcacatgtatacatatgtaactaacctgcacgttgtgcacatgtaccctaaaacttaaagtataataaaaataaataaataaataaaataaaaatacaaaccaaggttcacataaaaaaaaaaacctctgtgtgtgtgtttgtatttcatgattgttattgtattcattttgcaatacatcattgacactttttatatagactgaggtttgggaaccactgatttagaactgggatcagtaaactttttttttcagtaaagggctagatagtaaatatctcaggttttgcaggctgtatggtctctgttgcagctgttcagctgtgccactgtgatgtaaaatcagccatagacagttgataaactactgtacgtgggtgtcttccaataaaactttatttaaaaaaataaatagtggtggactagatttggctcttagactgtagttgacagatctttgatctatacaaatgtacttcattccatgcataagaaatttgaggtccagagacattaattaacttaactaattaataaatggtatgtaaaaattactcatttctagtggaataaaaatgtttttaaatgtttctgactagcttattataaatattatatatttataataatatactattatattagtagtataggcagtagtatattagtagtagtagggcagattttctactctgctagagctcacagttaagaagacttaatgttttgctaattgcatttaatcccactatattgagattatcttgttctgtcacatttattggattaatgtgatataccaggctcttccccaatcatgtaggctcaaaaatgtttcatgagaagaatccaggttttttttttttttgttttttgttttttttaagagatcaccttttggatcttatttcacttacctcaaaaaatatggtgaagtgagcagattgtgttgcttgcctggcagcatttgaaaccaattttggggatttgttttctgagttaatttctgagccagtgacataataaagtagcacataattgctaatttgagttctgctttgagaatagtttactcattgttagaggatgactgagattttttttttggtctttttacattgaacttactgaaatcatagtcatgccctctgcttagatcttttccaaatctgattcagcaaacctgattgatacctacagaattctggtactgcaaatcatggtgcttccaacaactttacacttgaaaagtgttatggtggtagtggggatgttgatggtgataatgaaagtgggccagccttatttgactgtttgcttagtaccaaggattttacctgtgtgaactaccctcgtacatatttttttccttcttgttacggtgaatcaattatccatgttctatggaaagccaatcttttatgtgtgtactggatcccatcctgtacccatttaaggctattactctagcaattctttctttcccacattgacaattttccccccttcctctgctggattagtgtcatctgtatataggaataggcacactgtttcattgacatattaaggaaagtttttctgattccatatttttgtccagctatagctcaatttttctgcttttcttttacggcaaaatttttaaggaaaatatttgtactcatggttttcattttccgtcttctctttcactattgaacccactcaaatcaggcttcacactcttcacctctctgcccaaacaacttttgtcaaggtcactggtgatttgtactttgaaaaatcttatttgacctcttcagcaccatttgatgtggttaagcacagccctcattcttgaataattttcttgatttcaaccactgccttggttttcatctctttggctggagttttcccaatttctgtgacctctaatagacatggaatgccccaagatttaaccactgggcttcttttctatctgtattcatttcctgagttatctagtcttgtttaaatgttgtttatattctgtgaattccagaatggataactgtaactcatacctatcctctgactccagatttgtgtcactttctaactacttgatctgtatttgaagatctggtaagcacccgaaacttgacctgtctaaaactgaactcttgatttttctgccccaaactctattccttcagcattcctcatcttagcaagtagtacctctgttctttcacttgctcaggcataaaactgaaagagttttccttgagtcttctttctctcacaccagtatccaattcatcagcaaatctataggctctaccctcaaaccatccagtatttgaccccttctccacacctctactccaaacaatttggcttgatagtaattataataatagtcttaagttttgaaagttaaaaacagctcattgggagtacaaggagtgggggaagaagataatttcaggcagatgggcagtacagtcaaaagttgaagagattggtgtactcaaaggataggagttaggagtaggttatagctagaacaaagatgtggattcaagaatgatagaaaatgtaatttggaacctggattctaagtatctggactttatcttaaggccatatgttctgagccttttttccaccccagtattcggaaatttgctaatcctttatgtacctccctatggcagtagttccccatgagtaaggagaagaattagatcacccctactttccaagatgatcagatatattcccttctgtccctgacaaaacccataaacaaacatacacatacacccttgtgtgagagtcacagttgcatgtggtaagcctcagaataatattttttaaaagcatcactatagcatgatccatgttttagaaagacaactgtggtgtggatctgtaggaaccgagtatttagtggttttcatattggatgtttgtgaatgtttgaagacattacatattttgggaataatttcttgaccacttcagtaactggaggagagctagtggaaaaagatgatgaagaatgcttagtgtttttgtttttacccttttaaggggattgtgcagagacacagtgtcattgctagttctgtagtgtttgacaaaataactgaatgcctatttaattttttccaactttttaggaacgcctttttacccaagtcagccggtgtatcagtcagcacctatcatagtgcctacgcagcaacagccgcctccagccaagagagagaaaaaaactgtaagagatttttattactttttcttattttaaatctaaaatctattcacttatcagataagtttacgtagtcattattcatctcaattcacaaattactgtgccttttttttttttattcttcccttatagtcacaccacttcacctggaggatttgtatgggcatgtaattagaagttgttcataccatttgcataatatcatctttaattattcactgagctaggtttgctacatgacaacatgtactccacctttagaactgggagggtttagtgggctaaggttttactcagtgtgaggaatttaagctcagttctcacatctagactctcctttaacaccagtctttttctttttttttttgagatggagtctcactctgtagcccaagctggagtgcagtggcgcgatctcagctgaactgcaccctctgcttctggggctcaagcgattctcatgcctcagcctcccaagtagttgggactacaggcacaagccaccaggcccggctaattttttgtattttagtagaggtgggatttcgccatgttgcccagggtgatctcgaactcctgagctcaagcaatctgcctaccttggcctcccaaagtgctgggattataggtgtgagccaccgtgcctggccaacaccagttttaatcagctctccattcaagtatgaattgacagaagaaaaaaatagcacaaggaaaaagaactgagatattaaggatagcaagaaaaatccttcctgtgaaatagatatcttttaagaaacaaaaaacagagtttagaaaatgtattctaattgttttttataatttataggggttttgtctttgtctaatgaggcaggcccaagagaattggagtgtagtaatataaaagtcaaatggcagaaaaattgtagaagagtggcttgcaattccttacgcaacagaacagacaaaatgggtgatctttttattcaagagagactcccacattcacacgagtaagataggtggggtgatttatagcaatactcttgaattactctaacttaataaaaattaatgaggttcaggccgggtacagtggctcacacctgtaaccccagcactttggaggccgagatgggtagatcacttgaggtaaggagctcgagaccaacctggccaacatggcgaaaacccatctctactgaaaatacaaaaattagctgggtgtggaggctcgtgcctataattccagctactcgggaggctgaggcacgagaatcacttgaaactgggagggggaggttgcagtgagatcgtgccactgcactccagcctgggcaacagtgtgaactgtatctcaagtaaacaaacaagaaaataatagtgaggttcaagactttggtttaaaacttgtttttatcattagaaacaaattacttgtgcatatatcataatgaacaggacatgacaatgtatcatgacactacagtcaagaaactatatgctttggtaatgttgaatcagcatgatagaagttggacttgaagaacactctcagaatgcagaaaaatgaatagaagaaatgaaaccggaagacagtagttacagatgtttctaaagaagaaagtagaataaatgaattaaagctatacttaaaactttattagaaataattttccatacctaaacaatagctggcattagaagtcttaattgaaggactcccctaaaagcgtccagatccaggtagtttcattagtgaattccttgaaattctcaagaagtgtggactgccttgattaaggtatggtggtaataaacaacagtgggtcctttatatcttagcactctcccagaatagaatgcctagtcgcagacacttacctcctttacagcaccaactccactgacatctttaagcatagggtagcctttaaaaaaattaaaataagaccatacacactttgtgcttattgcattttttcacctaccagcacatcttaatgattattctgtgtcagttcatgtagatctgcctcattctgtttttttgagacaaagtctcgctcttttcccccaggctggagtgcagtggcgtgatctcagctcactgcaacctccgcctcctgggttcaagcgattctcctgcctcaatctcccaagtagctgggattacaggcgcctgccaccgcacccagctaatttttgtatttttagtagagacagggtttcaccatgttggccaggctggtctcaaactcctgacctcaggtcatccgcccacctcagcctcccaaagtggtgggattacaggcatgagccactgcgcccggccagatctgcctcactctttttactggctgttaagtatttaattgtaaggacgtaagataatttttttttttaaatggagtcttgccctgtcgcccaggctggagtgcagtggcgcgatcttggctcactgcaagctccgcctctcaggttcaagtgattctcctgcctcagcctcctgagtagctgagactacaggcatgtgctaccacgcccagctaattttttgtattgttagtagagatggagtttcatcgtgttagccaggctggtcttgatctcctgaccttatgatccgcccgcctcagcctcccaaagtgctgggattacaggcgtgagccaccgcgcctggccgacgtatgataatttttgagctattctgttctcgatcaacctttttccagtctttgctggaaaaggcatgattgcagtcagcattattacatttgtatataaggttgttgtcagaataaattattcctaactcgtagggtatttatattttttattttggtaaagaacttcagagaattatttacagcgtttaaaactttattctacgccaggtaccgtggttcacacctgtaatcctggcacgggaggctgaggcacgagaatcgcttgaacctgggtggcggagattgcagtgagccgagattgcgccactgcactccagcctgggtgatagagcgagactgtctccaaaaaagaaaaaaaaaggaacttttatctatgcagtaactttcatatattaaaagtattttatgaaacttgtatgttaaatatggtaaataaaatcagtcttacaggttcttacaaaacaagtataaatattaatagtttgcctttttgacctagaaatccagccaactaggtttcattttagcttgttattctaattagttcatgtcagagctaatggcctacatttatctgatggatctgtgattgaaataaagtcaaatgtggtgattatcacctttgatatttgacaggtttcccagtttgcacctttaactcacttatatgcctataaatttgctacacagacactcatctgtacatatgtcattttatttaaccttatagataagaattcgggatccaaaccagggaggtaaagacataacagaggagattatgtctggaggtggcagcagaaatcctactccacccataggaagacccacgtccacacctactcctcctcaggtaagacagagtgagctgtaatggatggcactatttgttcactaacctctactgaactcttctttcttctatagccactttctgtacttttcatttccatcagttgtctcgcagcctcgaatatctaaatggtatttaaacagacatgttttttctctttgcaaattataatatttttaaatttttattggtaatatatttatgtattgttttcacaatcagagcacaggtgaggtgctgccactcttcttaatgaactatcgcatgatgccaaaaggagctgcattcttgtagaaacctcatcattaaatgagtatttcacatttcacatggaaccttaggatttaagtgctgcaccttttgttaacgcaaacattaaggttgagaatttaacatttttaccaaacagtgttgcttgagatgatttcctgtgttattgagagcatattaggatgtataacaggtatacttcttaccttttagaactacataaatgagcttcttgagtgcagagtgtcttctttaattacagtcatcccttggtatctacaggggatttgttcaaagatgccccctccacagtaccaaaattcgtggttgttcaagttcattatgtaaaatggcgtagtatttgcatataaacagtgcacatcctcccatatactttaaataatctctaaattacttataatatctaatacagtgtaagtagttgtcatactgtagtattttaaaatttctattgtgtttttatttaaaaatgtttttttctaaatattttttatccaccgttggttgaatctctgaatgtggaacttattaataaattgtcagttaggcacctttttcttcctggtgaagaatgtggttatcataatctcctaagatgttactttcttgtttttagaaatcaagatattgtagaggaaactggagtttagtaaactataatagagattagattccgcaaatctgacaagatttgtatttcaaggccgggcgcgttggctcatgcctgtaatcccaccactttgggaggctgaggtgggccaaatcacccgaggtctggagttcgagaccaatctagccaacatggtgaaaccccatctgtactaaaaatacaaaaattagctgggcgtggtcgcacatgcctgtaatcccaggtactcaggaagctgaggcaggagaatcgtttgaacccaggagacggaggctgtggtgagccgagattgtgctgctgtactcaccagcctgggcaatagagagagagagactctgtcttaaaaaaaaaaaaaaaagatttgtatttcattcctcctatgtcactttgcattttgataaatgatatagagacacgtggttttcagatcttaaaaattatctaaagtgaagccaattgcaggtgcagtggcacatgccgatagtcccagctatttgggaggctaaacaggaggatcccttgattccagcttgggcaacatagcaagatcctgtcccttaaaaaaaattgtctaaagtgaaagcctaatgtctagaaacagataaaaagaaagctattaaggagtagggggctgctctctttgctcttttatgcctggatggtaaaggggttccttggagcccagtttacaaacaagtgatatggatgatcacatagaaagcatttcagaatgatagactattgacttcattttagtagtacagacaaaaataaaaagttcataaaaatattcttaaatatcaaaatcacaaacagctggctgagtttagagccccttggaaatctgtggatttgagaaagacttaattttggtcctttgttgtaatgatatgttttctcttggaaatgatggtatctggctgacatttatctcagtctttcattatccagatgagtatatatgtccatctggacatgtgtgttgtaaggtcatgttaataattcttcatcactcctcattattcccctagggacattccaattttggaatgattaagcaggtcttatatttagtctcttccctggaagtgagcatgggataagcaaaattttcaaattgaagtaatctatatatgtgctctgttaggtgggggcacactatagcaaaactttgcaattagttgatcagtgcagtcaaattttagtctgtattttcaaacatattaaaatgttactactgtcaagccagataaaggatagacaatcctttgttgatttctgtttaaattctcaatttggacatgtatgtgtctttttgcacttaaatgccctgtggggtgtgattggttttctgtaactttccaagcttggttcccaccctcttctggtatccctctgtgtttagctacagacatctttttgttctgtgtctttccccagagactgtggttctgaatatgagtgtatatttctctataatcataaagcacatcgaatctacactttcaacagatgaaggccatcagtcaatagtagtaatttggtagttctttttgggaagtgtaacatcagttataaagcataagtttattaggtgaatttcatgcttttaaatccaaatgcatgaaattcatggaatgaacgaatagctttttaacagagacgtgtactagagatatttcattttcctcttaagaaaaacagtagcacaagcataatgatgacaactgacatttgacctcattttctggagcatcatagaaaggatgcagtggctcacacctgtaatcctagcactttgggaggctgaggcgggcagatcacttgaggtcagaagttcgaaaccaccctagccaacatggtgaaaccttgtctctgctaaaagtacaaaaaaactagccaggggtggtggcaggcacctgtaatcccagctactcgggaggctgagacaggagaatcgcttgaacccgggaggcagaggttgcagtgagctgagagcaccactgcattccagcctgggcaacagagagagactgtgtctcaaaaaaaaaaaaaaaatgttgacccattgtttcagaagaagctagaaatgtttagttatgtgtaaaaaagctgcaagttataaatattggcaactaatttccttaacaaaatagcaatctgccagccaaagaagactcattagatttaacttcagttttactagttttcaattttgacatcaatccagataaatacagaatcatatctggttagaagactacagatgagacagccctctgcatcagaatttaggattcaacagtaaatactgtagtattggccttaaagtacctgctttgagttagacataattgcttatgctgtggataaccaagcctttccctatcaccgagggaagtcccagtctctgtaaagggaaacagaagacctgttactaagatctgactggtgcagaggtgaccaagtggggcagaattgtagcacagataccagagacccattaatggtggtggtacatgtgaaatagaacagggaagaggtttaaaactttgacttggaatcagacataactgggtttcatgtgtgggttccactgcttagctttgtaactttagcccaattactttatcccagagcattgctttctacatttaaaaagtaaaacctatcacacagagaggattaaatgagacaaaatacttaaaaattgtttaagttcagtgcctggtgcgcaatgaatattcagcaaatatctattactaatattacaattattattatttcaggaggcacagagaatgactggaagaacgtgggaaggctttaccacagagacaccatttgatctaattttcatgggtattcacaaaatgaaagggaaaggggtattgaggcagaggaacagcatgtgcaaaaatgggaaattagatgaagggaggctattattatcatatttcaggtgagaaattcattgaaggagaggaagccagttggagagatgtttagcaattagttactaactagataaggactctaaaaaggatgaccatataatttaccatctaaattggggtgattgtggaaatgaatggcaatgctattgttaatgccagcacagcaggcgtaatcagtactgcacatgtaaatggggatgcaagttttctccagatgtaagggagagagagagtcagggatgcctcttcatgtttaaaaatacgtcttttgtagtgaaacataatattgagtatacatggggaagtttaaagagcgggatataatgagtttgcttttggcaggtggtcaagccattgtgatttttatctaatttggtcttgaggtttctctgtcaagagtggccataaaccaggatagccactctctaagagagccctgaccagggaaaagttatgtttgggtgtgtttgtcaggtgagacataatgaggaagtgaaaccaaaatgcatgaaacagaaaaaaatttactacttcctaatcccagagaggttagcagtgctgatgggaggctgataggggagctctgaagacagcagggaactcacccagcaggtggagagagagagaaagacgactcgtgggactgtccctttattaaggtccatgtcctcccttaggcttccccactggagttatggatttgctagtttgaagaaaacactttcaaagggtgaacttacttacaggactctggtgttaaccattaggttttatcatggtcagcagctatgggatatgttgtgttttgggtcagtgagatgaggaacaaacggcctctttcacaagcaactacacaggaaggaaatatttgaactaggccaaatgtgaaagggtttcaaaaacatatgctagccctaaaagtggatgccgagggagcaattatattaaatttgtgacacaagctatgagttaattgagggaaactgcattgggtttctgtgaggagaatggagaggagaaacaaatttttgctgctgctgtttttaccctaatgagaagtagacagaatttgaaactgttcttcaaagtcttaaaattttctgtgggttagctagtagagattttgtatctcacatatttaggaaatatgcatatgtgtatatacatgttccctgtatatacacattggatccctgtatatgcacagaggatcacagtgcgtagatggaggtgcatggctggatatcatggctcacgagaacacttgctgctggttttcactgtgttacttagatttatgaccttgggtcagaacattaagttcttaaaacccctattttttcatctgtaaaatgaggaattgtacgaaataatctgagagttcccttttagttcttacctattaaagtgggaaagaaggaagaattttgttactcgctcagtatcaaatctctcaactcctgatgatgacagtaaggcataaggaatatccctgtatttagaaatatgctagctattatgcctaatagtcttcattgaaacccggtagtgtaaaaataaatacatgatgccatgtcaagattgtctacttccaaataggatgaatggtggatcaaaaatcacttaattttttttttttttttttgagatggagtctcactcactctgtcacccaggctagagtgcaagtgcggtggcacaatctcggctcactgcagcctttgcctcctgagtagctggaattacaggcatgtgccaccacgccagctaatttttgtatttttagtagagacagggtttcatcgtgttgacccaggctggtctcgaacacctgacctcaagtgatctgctcgcctcagcctcccaaagctctaggattacaggcatgagccaccatgcccggccaaagatcacttaatttttaaaaatgaattatgtacctttcttccttgatatactctttttcccccctgcttctagaattattattgtaatgaaacacagttatgacatgggagagagtcctatgctatggggctttggggtaggaaattatggattgatagcgtatcttaggaaagatacaatctctcctaccatttgggaaaattactaaagtcagcaggttattcagtcttttgttgagctgcttatgaagttgatacctgcaaaccttaaattccatgaccatttattaattacagttgacccttgaacaaaatgggttcgtttatatgataatttttttcagtaaatacattgggaaattttttggacattgtgataatttgaaaacttccagatgacatattgcctaaaattatcaaaaaaagaaaaatttaggtatgtcatgaatacacaaaatatatgtagatactggtctgtgttttcatttagtgccataaaatatatacaaatctattataaaagttaaaatttatcaaaacttaggtacacaaatacagaccatacagagagaccatacagaccatacagagagaagtgtcaacagacacaaatatgcaatctggacatggtggtgcacgcctgtaatcccagcactttggaaaactgaggtggaagggttgcttcagcccaggagtatgagaccagcctgggcagcatagcaagaccttgtctctcaaaaaaaaaaaaaacaaaaaaaaaacaaaactacaagaggcaatattacatcctaacttcataaaattaactgtagtacatactgtactaatgtaattttatagccacctcctgttgctattttagtaagctcaagggttgagagtatccgcttaaaataccctgtgacactaatcatctccagatgagcagttcatctctcctgtaaattgtgcctcatagtaaaaagtaatttctctttgttgttacatattttttcattgtgcttagtgcattgccataaaccttgaataacaccatgggacccatacagagtgccaccagtgatgctggcagtacttccaagaggcagagaaaagtgctaacattacaagaaaaagttgagttgcttgatatcaactttttgatatcaagatatgcttgatatctaccatagattgagatctgcagctgtggttgaccaccattttagacagatgatttattttataaacagatgatgtaaacttatgatactgataaatacagcatagtattggaaatgtattttctcttcctgatggttttcttaaacacattttcttctagcttacattattgtaagaatatagtatataatatataaaacatacatactgagaaaaaaatatgttttatcggtaaggctttcagtcagcagtaggctgttaccagttaagtttttggggagtcaaaagttatacacagattttcaactgtgtggggtcagttcctctagctcctgaattgttcaagggtcaactgtagttcatttcatggtttagcagtaatagtttcctagaattgggtctatagcttcggttatgatattcatgttatatgttaatatgtgcagtaaatagttacattcctgcatgaagaatttgaaggtgatacctagtataatgtaaacaaatccaatcttttaaaatttcattttgtcatctcagtcataggcactgataaattaatagcattctgtaccttaaagcatacaggtatggtttttgttttagtggtgactacgataaaaatagtggttactaaattaaattatatttttctttatctttaatgaaataacttatcattagtaacctcccttgacttaaatggttcttttcaataatatgtaaagccttgtagactttaaataggtatctaaactggggtggattctctcaaaagtttttaaatgggacatttgaaaagtgtcctattctctgttcgtcatgatgagcagagatccttgctttgttatgctgtttcatagattaaaatgaatttgtatacactatatggtttgatagaggaaataagatctagtgtttggtagatcagtaaggtgactatagtttacgataatccattgtacattttgaaatagctagcagagaagaattcaaatgctcctagcataaagaaaagacaaatatttatctttgaattatgtgaatgtgttaaatttttgtgggtacactgaaactgtgtacatctgttacgcagtaataaaaattattattattatttttttgagacggagtcttgctctgtcaccaggctggagtgcagttgtgcaatcttggctctctgcaacctctgcctccctggttcaagcgattctcctgcctcagcctcccgagtagctgggattacaggcatgcaccaccatgcccagctaatttttgtgtttttagtagagacggggtttcaccacattggccaggatggtcttgatctcctgacctcatgatccgcccacctcggcctcccaaagtgctgggattacaggcgtgagccaccacacctggccaataaaaattatttttaaggaatttgcacacagaccatcaaagacctactcattgcttatctgacagaataaaaaacagtatcttgtttaatttttgtgtattctgtgaagttaagaagttttcgatgttcaccagttatttgtgggtgtatgaattatctgttgtacacgtttcttttgggtgatgatttttgtctgacagatttataagagggctttacatgttaaataaatactttgacatatgttaacatttttttcttgtttgatgattgtgttttagctttgttaatcgtgccttctgtcatacggaattgttaaattttctgtttcatttatttttttgagacagggtcttgtctgttgccctggctggagtgctgtgacacagtcacagctcactgcagccttgacatcctgggctcaagcaatcctcccacctccacctcagccttctgagtagctgggactacatgcacatgccaccatgcctggctaatgttttttattttcagtaaagatgaggtctcgttatgttgcccagactggtctcaaactcctgaattcaagcgataatcctgcctcagcctcccagatttctgctatgagccactgcaccagctgaattttttttttattttgaaacagagtctctgttgcccaggctagagttcagtggcatgatcttggctcactgcaacctccgcctcctgggttcaagtgattcttctgtctcagcctcctgagtagctgggattacaggtgcctgccaccatgcccggctaatttttgtatttttagtagagacagggtttcgcctgttggccaggctggttttgaactcctgacctcagttgatctgcccacctcagcctcccaaagtgctgggattacaggcatgagccaccgtgcccaggcagaatttatttttgatatatacacttatatatcaaaatgcacttagattagttccacatctttgcaattgtgaattgtactgctataaacatacgttttcaaatctctttttcatatgatgacttcgtttcctttgtgtagatacccagtagtggggttgctggatcaaatggtagatctacttttagctctttaaggaatctttgtactgttttccatagaggttatacattcccaccagttttacattcccaccagcagcatataagcattcccttttccccatatccatgccagcatctattgttttttgactttttaataatggtcattcttgcagcagtaagatggtatcgctttgtggtttcaatttgcatttccttgatcattagtgatgttaagcatgctttcatgttgtttgtaggccaatttatgtatctttttttgagaaatgtctattcatgtcctttgcccactttttgatgggattattattattattattattattattattattattattattgctgatttgtttgagttccttgtagatttccttcatcagatgtgtagtttgcatctctatgggttgtctttttactctattgtttcttttgctgtgcaaaaggtttttagtttaattaggttctatttatttgcgtttttgttgcatttgctttggggtcttactcatgaattatttgcctgggctgatgtctagaagagttttttccaatgttatcttctagaatttttacagtttcaggtcttatatttaagtctttgatctatcttgagttgacttttgtacaaggtgagaaatagggatcgtttcattcttttacatgaggtttgccagttttgccagcaccatttgttaaatagggtgtctattcctcaatttatgtttttatatgctttgttgaagatcagttggctgtactttcttggctttacttctgggttctgtattctgttccattagttatttgcctacttttataccagtactacgctgttttgttaactataaccttgtatgatttgaagtaattgtgatgcccccagatttctcctttttgcctaggattgctttggctacttgggcccttttttggttccatatgaattttaggatttttttttctgattctgtgaaacgttggtattttgatgagaattacattgaatctgtagattgcttttagtagtatggccattttcacaacattgattcttccagtctatgattatgggatgcatttccatttgtttgtgtcatctgtgatttctttcagcagcgttttgtatttctccttgtagagattttcacctccttagttaagtatattcctaggtatttcattttatttttgcagctgtggtaaaaggtattgaattcttgatttaattctcagcttggtcgttgttggtgtatagcagtgctactgatttgtgtacatttattttgtaacctgaggctttactgaactcatttatcaaatctaggagtcttttggaggagtctctagggttttctaggtatacagttatatcatctgcaaacagtgatagtttgacttcctcttttccaatttggatgccctttatttctttctcttacctaattgctctagctaggacttccaaaactatgttgaatagaggtggtgaaatgtaggcatccttgtcttgttcctgttgtcagggagaatgctttcaactttttcccattcagtatgatattggctgtggttttgtcatatatggattttactattttgaggtaagtcccttttttgcctacttggttgaggattttatcataaagggatgctggattttgttgaatgctttttcagcgtctattgagatggtcatatggtttttgtttataattctttttatgtgatgtatcacatttattgacttacatatgttaaaccatctctgcatccttgaaataaaacccacttgatcatgataaattatctttttgatgtgctgttgcatttggttagctagtattttgttgacagtttttatatctgtgttcatcatggaaattggtctgtagttttctttttttgtgtgttctttcctggtttaggtatcagggtgatactggcttcatagaatgatttagggaggattctctctttcccagtcacttggaatagtttcagtaggattggtaccagttcttctttgaatgtctggtagaatttagccatgaatccatctggtccaggctttttttgtgtgttggaaattttaaaattactgattcaatcttgctgcttgtcattggtctgttcagggtttgtctttcctctgatttaatgtaggagggtggtatgttccaggaatttatccatttcctttaggttttatagtttgtatgcataaagttgttcatagtagtctcgagtgatgttttttatttctctggtgtttgttgtaatgtctccagtttcatttctaattgagcttatttggatcttctctcttttcttggttattctagtgaatagtctatctattttttcaaagaaccaatgttttgtttcattgatcttttgtaatgctttttttgtttgtttgtttgaatttcatttagttttgctgcaatttctgttatttctttttttttttttttgagacagagtcttgtttagtttgtgcttgtgcttgtttttctaattccttgaggtatgacattaggttgtcagtttgcactctttcagactttttgatgtagacatttagtgctgtaaactttgctcttggcacttcttttgctgtactccagaggttttgataacttgtatcattattatcatttgattcagataatttttccatcttgatttcattattaacccagataccatgtagaaacagattatttaatttccatgtatctgtgtagttttgagggttccttttgcccccaagaactttaaaaatcattttcttaagccctcttaagtctgccttcaagcttttattttgagtgtccgggtttcctctcatcatttctgaccttggcaacctttcattgctttcaaggatgttctctattgcagatgtgtattgtcttgtcaggtcagtgtttaaagaaaaaacaatatttcatcaatctgaatgctgttagcccaagcatacaccctctagtttgttaagttgttctgttattatttactcccttttgcatcacatattaaggtttctgaagggatttgagtttgtgaccccttcgttataaactatttcagggctaggcgcggtggctcatgcctgtaatcccagtactttgggaggccaagctggggggattgcttgagcccaggagttcaccagccctggcaacatatcgataccctgtctctgaggcaggaggattgcttgagcctgggagtttgaggctacagtgagctgtggtcatgctactgcacttcagcctgagtggcagagcgagaccctgtctcaaaaaattgaataaaataaaatatttcaacaggtgtttgatgtgctctccttgttttttttttttttttttttgtaaattatactgtagtctacctaagttgctgaggttctaagcctaggactcacctttaaatcctcttaatttcactctccacagtcattacatcagcaagtcccatttgactcattcccaccaccttcactgctgttattgtagcctaagccactttgctctccttagacaacaggaactttctcactcatctctctgcttctgtcttgcctctcctctgttgattctgtacacaacagcccaagtgagtgatctttttaaaacataaatcatatcacaccgtttccccacaaaatactatccagtgtctcttcactattgactaactgtccatacaaaaacatacaaaagtccatattcatagaatttttgaggtgtgtaatggggattatgggaactacaagatgagatttgggtggggacagtcaaaccatattagtatagaaagaattagtatagaaagaactgatctatgtggttgatgcctattgtagtccttacatcctgtaattcctgcattagaattcagtggaattattgttaccattatattattgctatggtcattatttattgttttttattgcctttgtattaaaggaggtgcttgttatggcatgtcatatattattatattatgagaacacttcagagcttcaggttagatacccaatttttgacttgatctctgtactcagttatttcacaagccctacaacctcaaaactggagttcatggttttcctctaaccaaacccatgacttccaaaccttatgtctcctccagtgttccctttctcagactggcccctatctcagaaaccagaaacctaatgtttttctttttacccctctctcctcatagataccctctctaccatgtgtcatcagttacctaatcaagcccagtcagtttacccccaacctttaagtaaaattaagtaactgccccccattattaccaccaaaattatttcccttggactactgaagtaaccttgaaaattgcattcttgtaactgctgtttccttgctctagttcattctccatgcagtggtcagaattatctttataaaatatcagccaggtgtgatggctcatgcctgtaatctccgcattttaggaggctgaggcgggaggattacttgagcccaggagttcaagactagcccaggcaaaatactgggaccccatctctacaaaagatagaagaaaaaatagctgggcatgttggtacacacctgtggtcctagctgcttaggaggctgaggtggaaggaacacttgaactcaagaggtcgaggctgcagtgagctgtgattgcaccactgcactccagccaaggtgacagagtgagatcctgtctcaaaaaaaaaaaactaaaaaataaaacacaaatctgattatatcatattgctgcttaaaacctggccctggcttgccattgctatggggataaagaccaaaaacccttggtctggcctgtaaggcctgtctgcctgactcctgcctgcctcatttcacaccagattcccctgttctttctgcatccctcttaccttttacataagggagttgatcatggaatactcttccttttagaatcttcgtacatgtgttctctctgcatgagatgcatctaactgcccttcctcctacatgccaacattcacattgattttttgaaagtcaacctgaatgttgcttactcagaatatcttcctcacatacgtcacaaagtcagaaccccagattatgggtcatctttgtactcttaactttcccagtaaagcatttatacctatagtgattaaatgattaattttgtggtctataccatatgtttcctttgatagaatataagctctgtgaacccaggaatgttgtcttagccatgagtagattcatagtgttttgtacaagttaaacatcaggaggaaatacacacatattgacacacaccgttctaatgagagaatgggagaaattcctacgtaagaaagaagcatgttttggtagtttttcctggcatcgttaagtatattattgttttgcttctttttttttttttttttttttttttgagacggggtctgactctctcgccaggctggaatgcagtggcgcgatctcggctcactgcaacctccaccccccgagttcaagcaattctcctgcctcagcctcccgagtagctgagattataggtgcctgccactgtgtccagcttatttttgtatttttagtggagatggggtttcaccatcttggccaggctggtcttgaactcttaacgtcgtgatccacccgccttggcctcccaaagtgctgggattagaggcgtgagccaccttgcctggcctttgttttgcttcttagccttcatagtgtttctcagtggaggctatacttgtttatccacagattttatatatgttaaatacatgaggtatttatacaggattattttaaagtcattgaatgggattcttatgatgacagtaaatcaactctttgcttatatttatgtaactatttgaagtctctggctttctctaaatgaattacaatacaggtcagcaaatattttctctagtgggccagatagtaaatattttagactttgcagccatattgtctcttttagcactcttcgattctgccattgtggcacaaaagcagttatagaaaatatgtagatagatgggtgtgtctcttccaataacatgttatttatgggcaccaaaatttgaattttatataattttcatgtgtcaagaaatactgtttgtctcttgttttccccaccaccccgccaacatttgaaattgtagaaacttaccttgtgggcagtacaaaatcaggtatatggccccaggattgtagttgttgacccttgtctataaccacctctgtacttaagtattctgtcatttatgtgattaaaatagaagacaaaagaaggtgaccccttttttgtgcaaaacaatgtgcctatgtaaagaaaaatgaattttgaattgtgcaaagaagtattaaagaacaaatttagattctgttgcctgtttacttaataggtaaacattatgtttttaaaaaatgaattcctccagtatgtgggcctaagcttaccatgatctcttgaggtcaatactttaaatttagtatataaatctttgagtaggttctaaaggagaatttataaagaatttttctcaaacactatcaggaatctaatatcttgccctcccttaaactcttttcactctagtttataagtgagaaacactttattttttttccttgtaccaatcagaaccttgattttgaaaaatttgacaggggagtttaccatttacataattgatgagctgttgcaacagtgtgcgaagacttgctaaatgaccctgaccttttaactctgacttccttagcatctttattgagttattttatattttggtagtgattgcctttccagaatgattttataagttttcattcccaccaatagtgaaagtgactaaaatgcagtggctttgaaattccttaaatatattcttaactgtctagcttaatttcttcatatgtatcaaaatgcatacagcattggatgtgatgttttgtgtcacagtacttggtatgtttcctgatttttctgacttattgattagtaaaatagttcatcattattttttctttgggaagataaggaactcctttgttatagactgtttgtttgtttgtttgtttgtttgtttgcttgttttcgagacggagccttgctcttgttgcctaggctggagtgcagtggcgcgacctcggctcactgcaacctccacctcctgggttcaagcaattctcctgcctcagcctcccgaatagctggaattaacaggcacctgccaccactcctggctaatttttgtatttttggtagagacggggtttcatcatgttggccaggctgatctcgaactcttgacctctggtgatctgtctgccttggcctcccagagtgctgggattacaggcatgagccacaacacctggcctggttgagttacttctttaggagagaagagatgaaattggaggttaaactacaatttgacaagattatcctaaattaaaactaattctgaacaagactaaagtattgaattctggcggggcgcagtggcttacgtctgtaatcccagcactttgggatgtcaaggtaggcggatcacaaggtcaggagatcaagaccaccctggctaacatggtgaaaccctgtctctactaaaatacaaaaaattagtttgggtgtggtggcgcacacctgtagccccagctactcaggaggctgaggcaggggaatcacttgaacctgggaggcagaggtttcagtaagccaaggttgtgccactgcactcctgcctggtgacagagcaagactccgtctcaaaaaaaaaaaaaaaaaaagtgttgaattatatgttaatacgttatgattttattagtactgttggaggcttataaaatgataaagttgaaggagactgtaggatctttagttctacatttcatagctgtgagacctgagaagtactttcccagcatttgtggctatatacctatgtactggatacttggatttcaaattgtaacttaacaaacatattatctcactcctttcttacgactctttatacatagattctttctaggactttgttattttaaaatgtccatcttttatatgattgaaggtattttagatggaaaaatcattgactctagtagccttttactgtcttaaacatcttactttttctttgaatgtcatttttgtgacctacttttagcacttaccctgccccccccctttttatttggttattaatttcccaggcaattggagtagttaatatttttttccttttaggtaaatgatacaatttacaaatctttttttcctgggaaatgtggataactgcttaatgaatgctaaataacatggagtgtttcctttgttccagatctcttttcagcctatagaactgaaaaatcggtatttttagttttagctgtgaacctttctattgaatttcagtaaggcatttttttcccactgaaactaaggattcagagtaattacagcagtgctattttctttatttgtccccgtgaaaacagtaactctccatttttttatatagaaatataattttagtagtcttcatttagaattgtggaatatgaacattttcttggtctaatgaataggtgaaatgatagcattttccctatttctgtctattattctatataagccttatatagtcaaatataaatttcatgttgtacattctgaaaagcatagttacttaaatgatatctatcatcctaaattgtatgtgtccatttcattttatattcccattttaagtgacacttactgacttgaaaatattttttatcaactctcactttttaagtgtctctgtttgcccacactcacccacatcttaatctccccatccctactccccagaaaaaaaaaaagtaaaaagaaaaatagaattgtgcagggagctctactctgatagcactgatagaattcgttgtaggatattatagataccaaaaaaattgaccttagatctccgaggagagacactgctttgtttcgtggcttgtgtaacctcaaatcctgaatgaatacctgcctagaatgtgatgtagaatgaatgttcatgtcctctcttgtgtaattctgttccctctaagttgagcaatagctgtgatttttctcaacctatcctgcttggattttgatggccatttttcattctaatacaatgcctgagtgaaaatgagtttccttatatctctgaaaaacccaatattttagtcaagatttctgattctgaaaataccatatttgacccagaacctgtagacattttatggtaaaattgctttattatatactttcaaagttgcatttcacctgtatgattacatggataagtagcaggaatcatttttcaatattgttttcttgaatctgtaaccgcttttcagcctcattacattttctgtttgtcctgctttgctaggtaatttatacatgaagttgaccaaatccttcttggtctttgggagggtgttaaattccttctcagatgtgacgtctattgttaggttgacaagtcggcttgtccttagaaggaacactggggaataaattgtgctaatgattgttgtgctgtcttctcttgctgtggttaatagtaatcatttcttttccttcctctttttctgctgcctctttctttatcttccctgacttcccatgtacttttgaatttattaaattggactatatattttttccttgctttccttttttaattttgtgatctcctgtgctctactgtcttccctacttgcttgggttccatgttgctagtttttatgttcgcacgctcattatcacccttttttgtacttcaaatcccagcagctgcccagccaggtccccgagcacagccctgtggtttatgggactgtggagagcgctcatcttgctgccagcacccctgtcactgcagctagcgaccagaagcaaggtttgtgtatgactgttttcctccctcttatctttagtctcttttttattaattacattgccgtcagcattcaagagtaagagtacagcatccaaggattatttagacacccacctttaaacaaagctttgaggcagaaaattaaagtattctgcctctaggaaactaaagtagggatgattggtaaaattatttcatacatttgtttaatctctcactgttagtatctgtatacagtttaaaggttagctgccttaaactgccctttaaaacaaggtgggaagtggagggagaaatcctagcatatattactttacaagaacaatacagtttagcttatatattcagcatgtccctaggtatcttgctattttaaaaaagaaaaaaagataaaacatttcttcttacaagtttgggcttctatagccacatttggagatggagccaagttccaatcccggctccatcatgcactagttatttggtcttgattgagccactgaccttgtgtgtctcagtttcttcactgatagaatggaataaagacctatgtgcttgacaggattactgtgggaacatgcctatcacaggaaaagtgcttagtaaattatagtcattaatgctgtattaaggaatagtacactaaggtctctgctcctattgaacttgaacatgaaggtgccaaatgtttgttgaaataaatactgtgcctttgggaatataatagaaaacttaaaggaaatctaataccagaaagtgggatatcatagtctttctttcctgcctagttgtattttaacttgacctttgctaaaattgagagagaattctaaacatagttcggggaagcaagtaactttgaccctgctttatgtttcagatttctaaaaatgattggatatcaatatggaagccatgtaccttcttactttcttgaattatttattcctccaaactatttgtttattctatagctctatagttagtatatagattttctaaaaattattctttttttttttttttttttttgagacagagtcttgactcactgcaacctcctcctcctgggctcaagctattctcctgcctcagccgcccgagtagctgggattacaggcatgcaccaccatgcccagctaatttttgtatttttagtatagacggggtttcaccatgttggccaggctgctctcaaattcctgacctcaaatgatctgcctgcctcagcctcccaaagtgctgggattgcaggcctgaggcaccatgcccggactaaaaattatcctttaaaaaatatttaggaatggcccataaaatagatatatttaatattaaaggtttttgggtagactgcaagttagtcaatcacatttataaactttctgaaagatgtacttctaatacatgatttcattgatttttacatcaaacaaagattatgatatgtgtttttagtatagaaatttcattttccccctgagtattgagaagcctgatactcttgaacagacaggtcctatactgtatttgttatataagatagttttaaaccaaaagatagttagtgatccctaatgtggcatgcttcaaaaaactgcactgtcaagaacttctttcagcaacattttgagttaaaggagaactcctgcatgcttcaagcgaattctttaaatagtaaagccatttaccttgcgaaattacagactgtagaccaaatgtggaagtcgacttgctaccttcaatgataaagtcgttttgagtcaaaattcggaatgtttttaatcttagtggagaataattctcagagtatttcccttcaaaacttcattgcactttcgcaaatgtgtaatctttttgctggttagaattatgctaagcatattgaatacttcccatgcaaagaggccttaaaatatatcttctgtgcagactttctctgtagctgtgccaggatttttaaaaaatttatcacatactttgatgatgatagttctgtccttcctgaagacagtattattgcgtttgccattattttgtgaaaaataatgttaaaatttttagattatgagatccctgcattttgtcatatttaggcccagatttccagacaaggaatgcagacttgatttcctctcaggtttttgtttttgttttgcttagtggaaatttgaataacaacatcaacatatctaactggtgtataatataggcttaattggaaagtattcaggttaccttgatgaaaagaaaaacttgtagtattttaagtgcatttcagaggttataactaatgctctggaattactgttatcttccttttagtaccaactattcaccagaaaactaactctctttctttgtttctctgtttctcccttactccctttctctctccctttctctttctttctttctttctcttgctctctcgttctttctttcatctctctctctctcttttttctttcttggctagtcaaacagtaacatttctaatttcttccatagcctgccgatagctaaaatattactgttttcagagttttttttttttaaccaaatttatgtaatgttagaaagggctcactatttttttcagagaaaatggttttttttctttacactgaggatttttttttcttttttcttctattttgagacagggtttcgttctatcacccaggatggagtgcagtgacacgatcatggctcactgcagcctccacctcccaggctcaagcagtcctctcacttcagcctcctgagtagctggagctacaggcatgaaccaccatgaccagctaatttttgtatttctagaggcgaggttttgccatgttgtgtaggctggtctcaaactcctgagctcaagcgacctgcctgctacggcctgccaaggtgctgggattacgggagctacctcagccagccaaggagtttttaaaaatttccttcttcactgtagattccttttgaaattagcatataaaaactgacttttctcaaagattgttatattactcccagaaacaacagtctctacattttgcagattgtttttttctttctcaatagaaatgtctttactgagagtttgtactcagttacacaatctcatgttaactctaaagtctccctcctgcttgattgacttaagtacttctgtttccataagcctcccctttcctccaaaaagttggaagaatgtgggatttgaaatcattctcagacttgagcacttgctacttatatgactttgggcctgtgactgatctctaaaaccctcagtttcctcatatgtaaaataggcaaataatttctaccccaacaatcgtggttgtgagaattaaaagggacaatgtatgtatggtatttgacccagttcctggcacataataagtgcttaacaaatgttagctgccattattaagcttccggtttctcagagtttttgacatgaagagctagaatatttacatgaaggccaaggttccagacaaatctaccattttacatttgtttggcaccttatgaagacatagggaatacttcacattggtttgtagagagaacaactgttgaatgaattaaaatttttgcttggtattgatagtacacagctgaaatgattgctatttactgagtgagaaagaacattaaatccattgtactgaggatatggtatggataattaaaggagttagttggtgccttagtcttaatcttagtgcctgttgaaagcacctagtgtgttcagtgaatggtattctgtttgtaattcaaccattcatagcagtgttgttcatttgggactctgctggcatttaggacctattctttgtcaagtgagactgtacctcaaattgcaggatgctcagcattcctctctctgcttattaaatgacaatagcatcttctcagtcattgagagacttgtgacaaccaaaagacaacccagtcttggtcattgattccaccaccatatgagaataaaagggagcaattttattcttcttataaatttggcactctttatggaaactacagctaagcaaaatgaaaaagtatgtgtctgattactcagagccattattaataagctgactttcccctatgcacatatgttagtactaagcatttttttaagttaccaaattgggttctacatagagttttgtgccccactaaaaacaaacaaacaaacaaacaaattcttgccagatgcagtggctcacgcctgtaatctaagcactttgggaggacgaggcaggaggattgcttacgaggcaggaggattgcttgagctcaagaattcaagaccagctgagtaacatagcgataccctgtctctacaaaaaataaaaatattagccaggtatggtggctcgtacatgtggtctcagatacttgggaggctgaggtaggaggattgcttgagcctgggaggtggaggtcacggtgagctgagatcacaccagtgcactccagcctaggcgacagagcaagactgtgtctcagaaacagaacaaaacatatcttttattacaaacaactttccatatcattaaatactcttttaaaaacatattttaaatattgcatagtatgccattatatgcccagattatcatttctttaataaatctctattgttgaacatttagttgatttccttttttctccttttttcttgtattataaatagtgttgccttaaatattctagacatctatctttgctaaccctttcatgattattagaaaaattcttaaagctggaattcctgcaaattcctaaagatggccaaactttttataatagaagtctttagagggataaaataagtgtttttttttttaatttagctctactgtgtttttagctttctgcattttcagctttctgtattaaagctttaattagtgggttaaaggacttttattttagaatgaagaactcacaatttgttttgttttgttttgttttgtttgagatagagtctcactccactgtatcacccaggctgaagtacagtggtgcgatgacagctccctgcagcctcaacctccagggctcaggtggtcctctcaccttggcctcctgagtacctgggaccacgaatgcacaccaccatgcccagcttgtagaaatgaggtcttgtagtttgagacctcctgggctcaagtgatcctcccccttggcctcccaaagtgctgggatttacaggcatgagctcaccatgcctggcctaagtttttcaatactagatttttctgaagtgtgtatagaagtttatcaatcataggtctacttttgtttgattttttactatcagaaattgtttcccaacattaataattgaattgacatactcttattagatatttaatgtgagaatcaatttctctttttctctctctctctgtccccccaccccgctccccctctctccttctccccacttttcttttccctttttcattttgagacagcgtcttgctctattgcccaggttggagtgcagtggcatgatcacagcttgctgcagcctcgacctcctgggctcaaacgatccttccatcttggcctcccgagtagctgggtctacaggtctgcgccacctcacctggctaatcttttaattttttgtagacaaaaggtctcactatgttgccgaggcttatcgcaaattcctaggctcaagagatcctcccgtctcagcctcctaaagtgctaggattacagatgcgagccatcacaccctgccctatttttaaatttactgcatctaggtttcagtcagtggtcataaagggtgttagtctgataagctttcacagtggtattatgtaatctgggtgacttatttactccagtgagctggaaattattttcatcaaagatattttgataaatacatatttgttatatatggtgtgttccatctagaacgaacatacacacacacacacacacacacacacacacacacacacacacacacacacacacacacacacacacaaaaaaaataaagacaagttttcctgaaatatttttgtctgttgccctgtcaacttagtctgagggatttggcaatgagagcctattgattctatttcatcactgcagtaactaagaaaagtccaattttagaagcaccagcttctgtgcctataaataaaagtatattttaaggctaataagtgtcattacagtgaatgaattaataatatcttaatggtaatatttaatacctatttatctgataaactgcatatttgctttcacataattacaatttattgtaaagactcactttcattgatgtataaaaaattctgttggagaaagtagtctcagtttaggttgtcttttaatagtgcttgaatcttttgttgtcatttgataaacatactcatgagtatatgtttttccatggagcctgtttattgtgctaaggaagcacaaggctggaagccagtctaaatctcctttggtttcctccactcagggatgaatcacatatcaatttacctggaatttattaataaaaatgtggaaattattgttaattattgttccttgtgtttttctggtacccgcattatgatgaccagcttctcttctctctccgtctcattctctctatatatacacagatgcatttttgtatattatatcaaactatttcatactatgaaacactagtattttcatactatatgtatattgttttctttttcattggatttattcgtgtattaactttgttttctccttaattgttttacatgtaaagacacaagatatattttgttttttttgttttgtttagagacaggatcttgttcagttgcccaggctggagtgcagtgatgcattcgtagctcaatgcaacctcaaactcctgggctcaagtgatcctcccacctcagccttttgagtagttgggattacaggcatgtgccaccaagcccagcaatttccatttttataccttacattatttctggttatatacttccattgagaattgaagggtaaattaatttagaaactgatttttatcagttactgagaatagtttgatttcactgatagtaaatttcattaaataaaatgtgatgctttatcttgagtttttatacaagtaatactttttaaaataaaaattatctccccaaatacaaaaatatatagaataaaaaataacatcagtccctttataataatttaatttttaattgtttgcccttgtactgttttgccactgtaatatatccttggaaaaaaagttttttagggaacgagaagtggtagaaatgaaggttttcctaccttaaagaaaagcctcactcttaaaccaagaatggtttagcctcagttttggtgagcttttcagttgtattcttgatatataattttttggtgaatagattccttctcttactccaaaacagactttatgtattggataccaagtaaatagtaggtttaagtaaaaaaagaaaagagacaatgtttttggcataccagaataagtctaatatattggtctctgttctgttacctgtaatttagggtaagacattgaaagaattggcccaaggcaatatgtagtctctgatccaagaattattcttaaaacttatttttttttccccagaggagaagccaaaaccagatccagtgttaaagtctccttccccagtccttaggctagtcctcagtggagagaagaaagaacaagaaggccagacatctgaaactactgcaatagtatccatagcagagcttcctctgcctccatcacctaccactgtttcttctgttgctcgaagtacaattgcagcccccacctcttctgctcttagtagccaaccaatattcaccactgctatagatgacagatgtgaactctcatccccaagagaagacacaattcctatacccagcctcacatcttgcacagaaacatcagaccctttaccaacaaatgaaaatgatgatgatatatgcaagaaaccctgtagtgtagcacctaatgatattccactggtttctagtactaacctaattaatgaaataaatggagttagcgaaaaattatcagccacggagagcattgtggaaatagtaaaacaggaagtattgccattgactcttgaattggagattctcgaaaatcccccagaagaaatgaaactggagtgtatcccagctcccatcaccccttccacagttccttcctttcctccaactcctccaactcctccagcttctcctcctcacactccagtcattgttcctgctgctgccactactgttagttctccgagtgctgccatcacagtccagagagtcctagaggaggacgagagcataagaacttgccttagtgaagatgcaaaagagattcagaacaaaatagaggtagaagcagatgggcaaacagaagagattttggattctcaaaacttaaattcaagaaggagccctgtcccaggtaagccattctgccattaatctcgtgcttgctgaacatgaagaagaggcagtgtttgagttattttttaattggctactttccttgacttccagaaacatcgaatgaatgctgaaattcctagtctggtttcttcagtggtgtgtttgtgttttagtacaacctgcaaaagagttactccattgtctaaaaatgcaaatgagaatttccaaatatacaaaatgcctccaaggtatatgtcacgaaacatgttgggttttgttgttgttgttgttgctattgcctcattcatatgaattggtttctcaatgcttaattttgctgctttggggctagaaaacaaaaaaccaggatggtctatagtccctaattctgtcttcctagaattttaaaacccagtcaatcctaaaggaactcttctatgcatgaccagtttttaaatcttggatgtaggaagatagcaatcagaacatcaaaggtttataactatttttgaaaatataatgctgttgttgattcacttgcaggtaagcttaacgttctctcactttgccttttgaaacagttttattttttgtgtacatttttacatggtcattaatatccttggagtattatattcttcccagttcaaattatttctttttaatgtagcatcacctgggaccttaggaactaaccattgggttattgtaagtttaatcaaaagttatctgaggcttatcagctattctaggataagttagcccataggaatattgaagttttggctttgaacaattcagcacagcctatcttctgcaacattgccctatgctatataatttcctttctctgtgcctgtcagattaagtaatgcgtatgtaaattgggctttttgataaatgagtgctcctccagcagttgatccttgacatgcagtgaataggttttggtcaccatcatcctcagtatttttgtctattttgaggtgtataataaggaaatttgacaaacccaaaagctgatccctacttttgagatgtggcttttctacccagctcagttcttgagacaatttcctcatcagtgtctgtaagaggtgtctggccttttggaactgcagaacatcttgtagaacaccatgagccagcacaggaaagaaaacaatgcaaggcaattggaacagtgagaaatttttcataaatctttgtaaattacctgtttcctcaactatctggcttccattgacatcagtattcatagtgccatcactgttttaggaaacttgttccttggtggagagatgaccttagaccttgttttgtcagttaccctttagaaaaacagccttggggccgggtgcagtggctcatgcctgtaatccctgcactttgggaggccgaggtaggtggattgcctgagctcaggagttcgagaccagccttggcaacacagtgaaaccccatctccactgacatacaaaaaaaatagccaggcatggcagtgtgggcctgtagtcccagctactcgggaggctgaggcaggagaattgcttgaacctgggaggcagaggttgcagtgagccaagatcgtgccgccacactccagcctgggcaacagatcgagactccatctcaaaaaaaaaaaaaaaaaaaaaaaaactaaacaacttggtgttggtgtggctgtaggtaaatgccctccgaagaaacacgtgtttgttggagaacagtaatttgtttgacacttcaatgttcattttcatttgtagtgatacgatagttacaaaaatgagagaaactaatgaacaaaaatgtttttaaaatgtaaaagcaaagaaaaacaaaacaatcataggaaatataagttgaagatacaaaccatacctcagaattgaaataagtgtaaagtgaaaagaccatgcatcaaaatcatacttcactcatttctgacatatattctttttttaaacatcagtttgccacttagatgacctgatattgcaagacagtgcccagggatggatgggcaaacagaattttggtttaaataatgttcataccatggtacatttgtttgaaatgcagatgctctcaatattagtattgtgaacaccagcaccttaatcaaagagtatagactcttcagtggtaatccagagagcacttagaaaagaaagaactgtttttttaatgacttggaataacagaggtttgtgatgttgggaggtaaagtttcttggcatttttctagtctcctgattttttaacctatgtgtttaagggaattacaagttttataatttccttgtacatcttaatagtcttcaaaatccaacagtaaatgaacttcaagaacccctgcaactctagctttttttttttttttttttaattttttttaagatggagtctcgctccatcgcccgggctggagtgcagtggtgcaatctcggctcactgcaacctctggctcccaggttcaagcaattctcctgcctcagcctcctgagtagctgggattataggcgtgtgccaccacgcctggcttatttttgtatttttagtagagacggggtttcaccttgttggtcaggctggtctcgaactactgaccttgtgatccgcccgcctcagcctcccaaagtgctgggattacaggcatgagccaccacacctggccagcagtttgtaaattataaagcctcagaagcatttctgacccattcatttctgtccgaatattttttaatggttttgtcacaaaagttaacaatgaaaattaaaattacctccagtctttaagtatatccacctgacgtggtcatatgcttaatgactataatttatttgcacttattcacataatattcacttattataccttgtttactttgagaagttagtaaatcataacagccgtttactttgagaagttaataaattgtaacaccaaaacagtctggtttgcctatgagtcttttggtggtgacttttgagaatagtttttacttgtctctgcctgaggatgaaacacctcaaagctggcttcagaaacctgatacataaataacatatcagttggtatagagatagttggttaaagcagtaaagttataacataagggatatggtatcttttagttctgctgcaaaacattttcttgtaactattctagatcatatttctgagtgaataaaaatgcatcagttgaggccgggcgcggtggctcatgcctgtaatcccagcactttgggaggctgaggagggtggatcacctgaggtcacgagtttgggaccagcctggccaacatggtgaaaccccgtatctactaaaaatacaaaaattacccaggagtggtgatgcgcctgtaatcccagctattctggaggctgaggtgggagaattgcttgaacttgggagatggaggctgcagtgatccaacatcgcgccacttcactccagcctaggcaactgagcaagaccccatcttaaaaaaaaaaagaaagcatcagttgttttcggattgaagaacaagctctgtaaaattagaatttggtgtgtatatatcttcagtgtactctgaaaagcctcagttattggccacacttttaatatcaccgtcactttagtaattaaatgcataaaactagatattaattggatgatatattaaagtcttgggaatttttattgtttattctctgtatctggtgggaggaaaaaggagtgttttgaacttgtgggaaagcattccccattaatcatccaggagtttgttttctacaattttaggaatgtatatgatgtatagtatgtaacattaactttcccactttttaaaagaattgtgacttttttattttattatttttacctgtatcagatataaaaccattatttaaattttcttaggcagagggagatttctaatttttctatttattttgtttttttggctcttgcttatagtacatttttaatgtatattttgtaagtttgttttatgaacttatccagataaattttcctggatgtagattgatggcaagttattctaaagcagatttgtgtttactttatctgctgcatgtcttggggaaagcatttgctggaactaaatctgggtttaatgtttgttagaactaaatctgggtttaatgtcctaaagctacagttctatcccaaagcctaaggacagccataccgtatggcttggatactaattttcagggtaacagcaatcttctctccatccagttgaaacaacgtcctttctcatcatcactgtgttggttcagtggtttattccctctctctcttttttaagctatcttttcactgagcatgtcacccatttgggagtctcagagctttatgtgagcatctcagttccaggttcccactttgcagggatccaagatctctcttttcttatgggtgttaaaaatacaaattcattggttatagagactggcacacccttctacacccccaggaatgtaaggatggcatcagccactgacctgtagtttaccttatattctcgtaagctcagctaaggatgtagaagggtttccagattctgtagaatataacataggaagtttatttctcaaatggagatacgattatatgttttggtaatgttaacaaaatactgatccatgtagccaatcaagttgctgctttctcttttagtttagacttactgaagtgtaaagggagcatacttcagtgcaagaaaaatattttaataacaacccttgctttattctcaactgtgagagtattcagagtactttcaaagaaataaacatagcaaacataaaaccagagatataaaagtctatcagttttcctagattaaactaaaaatgactaatcttttaaataataaaatttattctaacctttgctcaacttacatattctaaaatatatttgaaatatctctggaagatttagtcgctggggccaaaagtagattgccaatggtttgagtatcctgttggcctaatcactatactactatgcatccttataatttagcttctacagaaacgtgttctggaaacatggaaacaggactccttacacattcctggttctttgtcatctaccaaaacaagcagagtgatccttaaagcaaggaccattggcttcagttttcagaggcttgagtctgagtgatccttagggataaataaaggttttctccaccttgtttgtaaactgtttccaacaaagctgcctaaaaggtatgtttctgccatcccattcctattttcttgtttccctccccagtaaactcttaggcattccttggaaaatactgatgctggtcaaattcttttatatactgcagaatgagcccagacacctgttagttgagcctgttggcaagtcccttacgtagttcttccttgcctctttatgtgggatagatttccccattttttacagtagttcatgtctttcatcatgagccctaaagtctcagtcattgggtattaacttagttctacatctttctgagtagttatactttgttcaaaatgtagctcccttttccccacatttagtaactaatcctcctccatgacaaaggactattgtactgacctgcttccagagaaggtaattcagtcagcctagagctgtgctccctcagtcttttaaagaaaacctctacaggaaaacctagtcttactataagttttccctttctctaatatccatcattaccttgcacacagttgccttgagaacttttcctgattgccttggaaaagataactttccatgttcctaacacaaagaaatgataaacacttgaggtgatggataccccaataaccctgatttggtcattacacattatgtgcttttatcaaaatatcacatgtaccccacaaatacgtatgactattatgtatccttaaaaatttagaattaaaaaataaaagcacaagtatgccaaaataaggaagataagtttagtaagactttattaagaaaaaagataattctctctactaatgcataaaaatgcccaaaatacatttccttcaatatatttcttttcttcattttctattactgtattaaaatacttggtaatttagtcacaatcataataaaaattattgtacatttttctgtttccaaaggctttcccaggcatttcaagcattattcttgtgatttgaacagttattcctggatatagttatttctgttttgctgatgacaaaaataagcctcagaatggtaaatcagctttctcaggctcacaggagaattacagccccttcctttatacgtcatgtttctattaatctttcagagatggtatgtcaatacaaaattacctcaggatttgacagttatactttatgcttgtgacctaggttcatagtgaaacatgaaagcccacctgtttgaaccacagtagttactgaaggcctactgcgtgtcagtcattgttccatgcacttgagatttatgaatgagtaatacaaagatccctgccctagtgatgtattaggaagttttaagtgctgtaaaaataataaaacagggtgaggaatgcaaaggggcagcaggttgtagtatttaaataatatgatcagagtcataggcctcagtaggaggtaagatttgagcaaagacgagggggattatttgagctaccctgtacaaaatctgtgattttcctctttttccttttgaaaaacatacctatcaaaacccttgaatcagtactataactcctactttgtctattaaactccagtaggcagagcactactggagaagatcacaccacttacagtggtgtgaatgcaactacaaattcacactgtccatcccaaccattatttttatggtttttctgttgaaaatcctttactctgcccagtgctactcacctgcagcacatgacctcgtctccttctttattgagaacattgaggacactgggtacgccttttttttaactttctgcccccttacaaacctggctatattgaaaccttcatcagactctcttagttgtctcttacagtctcgtatgtattcactgcctctctaccaccttcttattgtctgtctcatgccagagacgctctctgagtcccatataaccatttagctgccacttaaatggtatctttttcttctgacccaaactgtttaagaatagtctaccatgtcttctactattcttttcactattcaactaacatatagtctgatttatgctcctaatatgctagtggaatcttcctcagcagggtcatcagtagacacacatttatcttcctagtctttttgcctcattttaccactattggtctctttctctctctcttttaagttaggtcgagtgtaatttatatgcagtaaaattcacccttgttagctagcattcatttctgtgagttttgactagcacagaaagccatgtaatcacaccagtcaaaatataaaacagttccatcagctgggcgtagtggctcatgcctgtaatccccacattttgggaggccaaagtaggatttccaaatttttatctctgtcccaactcctcctctaaacttcaatcttaaatttccaattatctgacaaatatctccacttgcagagtcatctcaaattcagtacatccaatactaaaccagtcacctattcctctaaacctattctttcatctcaggttatacactggctttaattaaactaaaaccctgaagccactgttgacgaacctcccttttgagtccccttttttcccatccagtcatttcacaaggtgccctgtttttgtttttgtttttccccccacaagatagagtctcactctgttgcccaggctggagtgcggtggtgtgatctcagctcactgcaaccttccgcctcccaggttcaagtgattctcctccctcagccccctgagtagctgggattacaggtgcgcaccaccacgcccggataatttttgtatttttagtagagacaggatttcaccatgtttgtcaggctgatctcaaactcctgaccttgtgatccacccggctcagcctcccaaagtgctgggattacaggtgtgagccaccacgcctggccggtgccctggttttatctaatgtatttgtgacatttgttccctcctctccatttccttcttcccctgccttatccctgcacttaggtgtggatgcttgtcatttccttggtcccagttttgcccccacttgaaattgttctccaccaagtggccgaaatcatcttttaaaaatacagatctagctttgtcactcctctttcacgtctttttaagctcttcaggatgctgtgaaggattgggggaaatatcctgcaagatgaactctaaacttctcaagttttaccaccaggtcttctggtatccatatcctctcatacctctgcatcgtcagctacagtaatccaccagtgttctagaagcctggagattatttcaaaagcgccatatagtaggagtcttctgagtatacgggcatacctcattttattgcacttctctttattgtgctttcactgatacggttttttttacaaattgaaggtttgtggtaactctgtgttgagaaagcctgttaatgccattttccaacagcatgtgctcacttcctgtctctgtcacattttgataattctcacagtatttcagacctttcattattataggtgttatagtgatctgtgatcagtgatctttgatgttactgttgtaattgttttggggcaccacaaaccatgtaagacggccaacttgatcgagaaatatgtatgttctgactgctccaccaaccggcagttcttccatctctctccctccctcttcttgggccttcttatttcctgagatacaacaatattgaaattagggtattaataaccctgcagtgacttctaagtgttcaagtgaaaggaagagtcatacgtctcccgcttgaaattaaaagctagaaatgattaagcttagtgaggaatatgtatcgaaagctgagacagagtgaaagctaggccccttgagacagtaaagttgtgaatgcaaaggaaaagttcttgaaggaagtttaaagtgctactccagtgatcacacaaatgatacaaaagcaaaacagcctttttgctgacatggagaaagtttcagtggtctggatagatcaaaccagccacaacattcccttaagtcaaagcctcatccaaaacagtgccctaagtctcttcagttctgtgaagactgagtgaggtgaggaagctgcagaagaaaagtttgaagctagcagagcttggctcatgagattgaggaaagatgtcatcataacgtaaaagtgcaaggtagaagcagcaagtggtgatagagaagccacaggaagttatccagatgatctagctaagataattgatgatagtggctaccctaaattacacattttcaatatttgttgaaaaccaacagatactgatattgtagatgaaaccgccttatgttagaagaaaccatctacctactttcttttttttttttaagacagagtcttgctctgtctccagcctggagtgcagtggcaccatcttggctcactgcaacctccgcctcccgggttcaagcgattcttctgcctcagcctcctgagtagctggaactacagatgtgcatcaccacacccagctaatttttgtatttttagtagagacagggtttcaccatgttggccaggatggtctcaatctcttgaccgcatgatctgcccaccttggcctcccaaaatgctgggattataggagtgagccactgcgcctggccccatccagcactttcacagtgaaagagaaggggagaagtcaatacctggcattaaagctacaaaagacaggctgactctcattaggggcttatgcagccggtgacttctgtttgaagccagtgctcatttaccatatggaaagtcctaaggcccttaagaattctgctaaatctattcttcctatgctctataaatggagccacaaagcctggatgatgacacatctgtttgcagtgtggcttaccgactcttataagcctactgtagagacctactgcccagatagcaagattcctttcaaaatactactgcacattggcaacacacctagtaacctgagatcaaagagtaattttgactttcaagccttgttatttaataagtacattttgtatgtctatagctgccatagatagtgattcctgtgatggatctgggcaaactaaaaacctcctggaaatctgatttgttcgtggcatttgttccttcctcttcatttccttcttctgccttagttagccctgcacttatgtgtggatgcttgtcatttccctggctccagttttgcccctacttcaaatttattctccaccaaatagccaaaataatttcagcattctagatgccattaaaaacatttgtgggtgcagtggcgcacgcctgtagtcccagctactcaagaggctgaagtgggatgatcgtttgagctcagaacttcaaagttcatctgcacaaaagaggagacacctcagcaagattcctgtctcttaaaaaaaaaattgtaattcatgggacaaggaggttaatatatcaacattaataagcatttggaagaagttgattctaaccttcatggacaactttgaggggctcaagacttcagtagaagaagtaagtgcagatgtgatggaaatagcaaaataactagaattagaagtggagcctggctaggcatggtggcatgtgcctataatctcagcatttgggaggctgaggcaggaggattgcttgaggccaggagcttgagactagcctgggcaacatagtgagaccccatctctaagaaaacaaaaacatagaactaaagcctgaaaatgtgactcagttactgcaatctcatgataaaacttgaatggataaggagttgcttcttcatgggtaagcaaagaaaatggtttcttgagttggaatctattcctgttgaggatactgtgaacattatagacatgacaacaaaggatttagaatgttacataaacttagttgataaaacagcggaagggtatgagaggattgggtaaaatgctatcaaatagtatcacatgatacagagaaatcattcatgaaaggagcagtcaagcgttggagcaaacttcattgttgtcttattttaagaaattgccacagccactctcatgcctcagcaaccaccatcctgatgagggcagcagccatcatcatcaaggtaagaacctccaccaacaaaaagattacaccttgctgagggctgagatgatcattagtattttttagcaataaagtattatttaattcagataatatgcattatttttagacataatgctatttcacacttaatagactacagtttagtagaaacataacttttatacgcactgggaaaccaaaaatttgtgactcgctttattgcaatattaacttcattgccatgatctggaaacaaacccacaatatcttcaaagtatgcctgtgcctacacaggcataggatctgaatgtagtttttcatgtatttgattaaacactggcagtaaaatttagtggtaagatcaaagcaacagcatcaaacactcctgagtcttaccctttttccttgtctatctctgtgaccatgggtgaatttcctaacctctttgagtctgtttctcatctagaaaaatgaagataataatagtatttacattatagaattgtaaagataaaatgtgatgtatgtaaagtacttagcacaacatctgacacatattaagcactctgaatgttaaataatattgataattctattttcagcttgtattaagagcccaaatgttccctttgaactctgctaatacacagaagagttggatatcatgatctttgccctgaggaatttatcttccaaagaaaggaagctcaaggagttgataccttctgaaatgtttttaataaaatctgggacatgagatggtggaaaatcccttaggataggccgtttgcatgtataatgttgattaaaagtttttgtacccattatgtcatttatcttcacagtagacacatctcaaggtgacctctgctgtgattggtaaaggagaaggcctccttagaacagtgaaggaaaatctgtagttgagttgaggatggtaataccatcattaacttcctgctttggcaggagtggaaaattaggaagaaaggcaaagaaagctcagaagaatgggggggaaaatgaatagggcagccataaagtggtaacaacccaaatcagtttatcaactgatgcatgaataaacaaaatgtgatatatacataccatgaaatatcggaccatgataaggaatgaaattcacatggtgtacaatggatgaaccttaaaaacattacgctaagtgaaaaaagtcacaaaagaccacattttatatgattccatttgtatgaaatgtcaggaataggcaaatccatagaagcagaaaataaattagtgctcaccaggggttggggagagaagagagtggggagacggtgctaatacataccgagcttctttctggggtgatgaaaatattctaaagttatatagtggtagtggtcacacaactgtggttataccacagaccattaaattgtatagttttaaaaggttaattttatgatacgtaaattatatgtcaacaaatattacatatatattttaaaaagaggggcctggcgtggtggctcacatctgtaatcccagcactttgggaggccgaggggcggatcacgaggtcaggagatcaagaccatcctggccaacatggtgaaacctgtctctactaaaaatagaaaaaaatagccaggcatggtggtgcacgcctatagtcccagctactcaggaggctgagacaggagaatctcttgaactcggaaggcggaggttgcagtgagccgagatcacaccactgcactccagcttggacaacagagtgagactgtctcaaataaaagaaaaatgagtatgatatggtggtgccaccagcatctatataaggatttgcttagggaagttatagcttagaaattgaggaagtaaatttcaacaagaacaccacaattgacagtatcagagatacaggagtatttgtgtacagccaaaaattatatcatcttttgacacatgctattgttgtataaataaatttatacaacaattacttatatagtgtatacataaaaactgtattgtttttattctgtcttattactttactactagttaaattttacctcagtttgagagggtgttctcagcttggtattgaatgtaccacctgtagagttcaagaccagcctgggcaacatatggagacctttcgtccctacaaaaaaataaaaaattagccaagcatggtggtgtgtgcttgtagtcccagctactctggagactgagatgggaggattgcttgagcctttgagattgaggccgcactgagccatgttcacaccactgctctccagcctgggtgacagagtaagaccctgtcaaaaaaacaaaacaaaaaacacctgtagcaatcattctagaggcattgctcgatgtcacagatatgaaatatccagttgggccggcaaagcagagtggttcttcatgatcagaacataagggatctgtgttttggaagtagtgattctgctgtttctttgtttgtaacttggtcccttatgtttttggcccagttcagccaccctctgtaactcttccttcaactctcctacctgagacccttctggatctgtctcttctttccagctatctaaccattcatttattcacccatctgttcaatccccatttcttttcactccatttcacagactgtcattatcttacacctcagctattacaactctgctttcagacttctctggaaaagtaaagtgcacattttccagaaaattctttcagagaaaatattgctgctggatgccagatatctgtctaagacctgtagaaatagtcgtttcaagggtacaagatccaggctcccagattagccttgaaactatcattatttcatcctagctttgcttaatattattttttaatctttttgcaaatctcccacacctgtttgatgagtgttaattcctgcattgtttccttgatgctgtcttcaacctagaccacattaaggaacctgctcaattcagttagctgggtgtggtgcctggcacctgtaatcccagctactcaggaggctgaggcaggagaattgcttgaacccaggaggcggatgttgcagtcagccgcaattgcaccagtgcactccagcctgggcaacagtgagactccacctcaaaaaaaaaaaaaaaaagtatttttttcaatttttcaatatgactctattcacaaggttttctattctgataattcctcgaacccttaaacatataattatgtcaatttaaaatactcgtagtactttatgcatattgatatgtgtacattttacctctccaacttcttttacatctccaggattagtaaagcttttatttttctgttatccccgagagcttttattaaatgtttatttactcatttctgcaaatgtatagatttgtgttgtttttgttgggtttttgttttgtcttgttttttagggatctgatagtaacaaatcaggtatatttaaaatcaccaccctggtaagaaaaaattgtagtttttttttttttttcttttcttttttctgagacagggtcttgctctgtcacccagactagagtgcagtggcataaacatggctcactgcagagttgacctcctggtctcagtcttcccacctcagccacctgagtagctggaaccacagatgcgtgacaccacacccagctaactttttgtagagatagagtctcgccatattgcccagctggtctttaactcctggcctcaagcagtcctcctgccttggccttccaaagtgctggggttacaggcatgagctaccatgcctggcctgttgattttaataatagtagctatcattgattaaatgcttgctatttattagacactgtggtcagttctttaaccctcacaacaactcttatccttactttacagaagaggagaatgaggcatggaggagatgatacttgctgaaggttatatagttaataagtggtagaatcagaattcaaatttcaactctacaatttatactcatagccacgtctttataatattgcctctcaaattaagctacatatcctgtaaataaatcttagacttcagcattcaaaagttaaaatcatttaaaatagttcttactaaaataagatatttttatatgaaagatgaatatatacataaagctacagctggataaacaggtagatgataacaagggatacaaagtcaaatgtgctcaccctgaataattaggaaaagcaaaaagcacagaatgtatctttcccagttcattagttaatacctctctccaagtttctgccaattccagaattcatgcatgtaacctcggaatcaccttaatacttaatgcagtgtttaagaaataaaagtaggctggctgctgtggctcacacgtataatcccagcactttgcaaggctgaggtgagaagatcacttgaggcccagagttcatgatcagccttggcaacagagagaccctttctctacaaaaaatttaaacattagccaggcttggtggcgcatgcctgtagtcgcagatactcaggaatctgggacagaaagattgcttgagcccaggagttcgaggctgcagtgaggtatgatggtgtcaccacactccaacttgggcagcatagcaagaccctgttgctaaaacgtatagaaataaaaatagaagtcattatttatgtgatagcattcaatgagatgattaatagcatccaaaaactattagggcttttgtaacataataccgttattaatagttgtcattcattcaacaggtatttattgagtcccagactgtcataatttatattagtttttaacagaattcaaataagatttgagtgatatttgaaatatttaaatcagtatacctgatcatgtagggaaaacctccctttgacatgatattatacactgatgttccataaattgtataaatcatgaataacccctaaaacatggcttttctgtatatcttacaaatgagttttactctaattttaaagccataccaaggtgtaaaacagtacgtatagtataaataaaggagaaacctgtatgcacattcacatgtataatgcacacatatatgtgcttgcatatacaccagtattttctgaggataagtaggaaatacttaataatgattttctctggggagagagacctaagagcaagatggggaagacaagactttttcagtttttcctcgtttgttgtgaaatctttttgttcatatgaattacttttgtcataattaaagccagaagcaagtttaattataaattttgcagtaatatgtgtcttaggtctcattcaaataataattttcgggtgggtgaggtggttcacacctgtaatcccagcactttgggaggccaaggtgggcagatcacctgaggtcaggagttcgagaccagcctggccaacatggtgaaaccccatctctactaaaaatatagaagttagccaggtgtggtagtgcacgtagttccagctacgcgggagactaaggcaggagaattgcttgaactggggaggctgagttggcagtaagccgacatcgtgccactgcatgcactccagcctgggcgaccagagtgagactccatctcaaaaaacaaaacaaaaagaacaattctctcatgatttatctgatatatgtgaaacatagattgtcaaatttcgaaaggtacctaccagtctgttttgaatgatttctaatattcctcaagatttgcagtgcctcacttcttattaatatcagttattcttcagtaatataaatgcggagaacagaaatatttcttaagaatttattttttgtatttctgataccatttgtatcatgatgttttcattagagtgcagaaaaattccagtttttttggatataagatttagtattcaattcaacaaacatatcagcagataaagttggaataaatagatgctgacagttctttaaatttcaataacagactctagatcttctctaaaatgtcatgttaaaatgagttataaattagaatacccttttgactgcctattctccatattttgggacacattagagaagatattcaaactggaaactgtcatggaaaaccaagaaatatgaatgacttaaccatgagtttttatgatgtgccaaaagagatgtgataaatccatgcttcactatgtttggtacaaaatccagaattaaattggttaatagattgatttcatttgttctggcaatgctaatttatatctaccatgtgacaggcccttttctgacctctagcaccacagagatgaatgaggcaaagtctttttccactgagaacttgataattttgtagagagacagataaatatatatatatatatatatatatagggatgggtaaggtgaagagaggagggaggaagtgatggtccctgttagagtgtattttttattattcatagtagctcccacatattaaggttaaagcaaatttctctgtgctttgcagtctggtaatgtagactcactgatggtcagatggaaagtagattttttttttccatctagagttatatattcgaggcagtgagctgtagcattttatttggagatgaaaagtgttgagtaggtgtaagggtaactgtattatagtctctttcctaattaaattacatatttgtgctgtagtgattgacttttttgcatctgtactagatttaccttgaattaaattgcagtcttttttgatgatggtagaagtggttcaaaagtgtcttattaaaatgcaaaagtgcctaaaacacagagcagtaaaaacagaggcctagaagatatgccagtggtctcattggagtcatctttgttctcagtgtcgacaattgcttaatggactgtcctccactgaactttttggagcaaacctacttagtgtcactttgccattttatttttttaatgacatactgtgctgttggggcaacaaactgcacatcctgtcatgctacaaaagcaaaagacaactttaaccaagataaaaatgaagctggaattcaggcaagaaagtgaaggataaggcagacttgagaggtggggtattgagtggggaagcgttttgaagttagatctgtgtttcagttctagccccaacctttactctctgtaaaggggaaacttataatctctctgttcttcagtttcctcatctctgaaatgggaatactgtaatactacctacacaaagagatttaaccagtattgttgttctagagagacattaaccttgggtttaattttgattgcaggtcatttattcattaacagatttgccaggcactgtattggttgctgggtagattgaagagaccaacaaaatacaatccttatcctcaaagaactcaaaccctaataattattcttagcttgtatccaagtctttgattgtgtagagtagcaagggtgcacactaagtgggttggtaaaaatgttgaaactgtagagcagtaaatgggcctgatgttgaccaaaaggtaaaagccagatttctaactttgctgtgtatcagaaaccagagaagcacatgttcttaaataggtagaccttgaatgctggacgtggtggctcatgcctgtaatcccagtactttgggaggcccaggcgggcggattatctgaggttgggagtttgagaccagcctgaccaacatggagaaaccccatctctactaaaaatacaaaatcaaccgggcgtggtggtgcatgcctgtaatcccagctacttgggaggctgaggcaggagaatcgcatgaacccgggaggcagaggtggcggagatcacgccactgtactccagcctgggcaacaagagcaaaactccttttcaaaaaaaaaagagatagactttgaagctagtagtagaatcattctcatgcaagtgaatttacgtcaaaatttttggatttaagtggcactttgataagtatttgagataccaaaaattagagttcagtcaagagaaattgatgtttgaaacaagatagagaggtcttcagattctaagaagttatgttcgatatggaaataggaaaagcaggacttggagactgatacgaatataggcctaagagaacttttcaaaaagagtttgtatcagacaataccaataccaaatgctgcaaaaatacttgagtgtaatggtgaattgaaaggatgttgaatttgtgataattttgtcatttactactctgagacaaattccatcacctaagcagatataagcaccaaagatttggagaaagaatagtgaaatcaagaaaataaagatacaggtatgtccatggcagggcagaagcctggggatgtcaaaatacacactggacctgctgaagcatgatgagaaaagcagaagcaggtgcacgttttcttctactttccatgccactttggaaaagagtccaaacatttagctaagcgggggcttttaggctgcatacttaagtaagcattatctcctcacctggcaatatcagaagctggagtataatgacaaaaaattgaattcaacagtattcttccagtttagcatatatggctgtggaatcaccagctcagatcttggtataatttgagggtctggtatctagtccctggtacagatgtctcacattgcaatcctgtgacataatccatgaccttaaaatcatggtttggaatccaacagctgttctttcggaatggtcaaggactgaggtcagtttatataatgaggcacactgttggttaagctgatacaccgcttcaacactgcattcagattaatggtttctattgagccacttcttttctctttgcctaaccttgcatcaatagcacaattaccttcgttactttagttttataatatcctaatattacaagcccactacctttaaattctacatcaaaattgtattggcttttcttggcttttgctttttcatttccaaataacaacatatggaattgttctctgcacaaaataggtatttgatcaacggaaaaattagaagattttttttctttatgcatatggtatatttagggtttcatatgcattaacaattttcttataaatgtttacatcacataattcttagaattttcaaacacacccaaatataatttatacataatttttataaacagttctattatataaaataattattgctgttcaaatgagtcagttatgttgtttggaggagcaacagagaggcagacttactaaaatatattttagcagaaaaggttttgaaaataatattgggactttagctttctctataaatggatggttcctgcatttactatcaggaaacctgggccactgccattctgaaacagtatttctagagagtgaccaaagagagttggtgtaaaaatcctaaaggcccagaactgaggttaatggggaaaaaaaacccaagctctcggtggaagttttggtcagaataggagatgaaacagagtacagtgagaatcaggtagcttctgatcagtaagaaagtctaccatatatgttactggaatttttaagcctctttctcttagaattctctcagttcctattacatggtagattaatcgaagaaagtcattctgacttcctgttcttggcagtaggaatcacctttctcacttaaaagcagagaacaagcctaatatattctattattctattctctcttctatccaaccaccagtcataatgtgataataattttcagttttagttgttgccctttctacttacttttgtgccataatgatgccttattaataggctatctcatatctttactaataaaaaagaatgtgaataaaatatattaaatcaaagtttgcttgaaaatttacaggaatttgtctacttgaaatatgtgatttaaaacataaattgcctattttaaaaacttagttaaatgtcactatcaattttatttgtacaataaaatatctcgaccggacgcagtgactcacgcctgtaatcccagcactttgggaggtcgaggcgggcagatcacctgaggttgggagtttgagaccagcctgaccaacatggagaaaccctgtctctacaaaaaatacaaaattagctgggtgtggtggtgtgtgcctgtaatcccagctacttgggaggcttaggcaggagaatcacttgaacccgggaggtggaggttgtagtgagcccagattgcgccattgcactccagcctgggcaacgagcaaaactccgtcttaaaaaaaaaaaagaattatctccagagggctaactgaagtcatcacaagagaaaataacattctgactttggtgtctttagaaggatagcctacatcattacaacattctgattttcttctctataaaagggtctctaaaaaatagtattgcttcgtgattctcaaaattcatagctagagtaaaatagctgaggagaaacatgccagatcataggctttgtagacgctgtgtctcccttctaatttactttatgatatatattaaaggcaagagaaaaaagacttttccttgccttaatttcagattagttaaaatggatattttctttgattattttttcttttggtattgttttcaaagttagcatatattgattagagaaaattcaatataaactgatgatgataagaaaaatatggggtcaggcttggtggctcacacctgtaatcccatcactacgggaggtcaagttgggtggattggttgagcccagtagttcaagaccagcctgaacaatataacgaaatcctgtctctacaatacaaaaattagccaggtgtggtggcatgcacctgtacttccagctatacgggaggctgaggtgggaggatcacctgaaccagggaagttgaagctgcagtctgccgtgattgagccactgttcttcagcctgggcgactaagtgagaccctgtctaaaagaaaagaataaataaatgttgggttttgtcttggcagaaaggaaatcaaaagacaatatgtataagtttaacctgtctgtaggaaaatacctgtcggttaaaaagaaaacaaagcatctaataaaagattggataaaggatgagaataggaaattcacagaaaagaaagaacaaataaccaaaaacaaaaaaaggaaaaaatgcttaacctcattagtgagtgtagaaatagcccatttaagctattagtttgccaaatataaagtacttgtgagaatggagaaaatccaacacacatttatttgtgagaggagtatgagtaacctttgtggaaccaaatctgacaatatctatatttggaaataaaattactagtataggctgggtgcagtggctcagacctataatctcagctgctcaggaggctgaggcagaggattacttgagcccaggagttgaagaccagcctgggcaacatagtgagaacctgcctctttaaaaaaaaaaaaaaaaaaaaaaaaagatactaggaggatatatttaaaagttttcgtggtaagaaaaatagcaaaaacgtaagatttttcaaaagaaatgttgcatactagtatttgcataatgactacatgctaggagggattttaagtgaaaataaagcatgttgaagaataactcatatagttatgaccccatttttctgtttaagataaacttgtggctaggtgctgtggctcatgcctgtaattccagcactttgggaggctatgacggaaggattgcttgaggccaggagttcgagaccagcctaggcaacatagggagacccatctgtacaaaaaaacaaaaattagcaaagtgtgctggtgcgtgactgtggtcccagctactcaagaggccaaagcaggaggactgcttgaacccggtaattcaagagtgtagtgagccgtgactgcgccagtgcactccagcctgagccacagagagataccctgtctaaaaaataaataataaacttgtatatagggttgtgattatttgtatgagccatgatggtgtagaagactatatatcagacacagagtgctgaggcaaggttcacctcaggcaagtagaaatggctagttgggagagagggatattacctttgtttaagtggacacatttgtcattaaaaacaaaaagtaaaagataaaaggcaacagaaattaggaggaagaaaaaaagcccttggaatcccactacttagatgtacagattatatatttacctttgtaaacggaaaaataactatatataattttaaagccttgtaaaaacagtatgtcatagaaatgtttttatgtcagtaaacatacattatcgtattttgatagttgtgtaatagatatatggaaatgctaatattttaggtacttcagaaaccacccagaacacttcagtatttctattgaggtatagttgatgtaaggttaatgtacacataaaatatttgatcacttttaacaggaacatgctctatataaacgataactataatcgtatttatcacccaaaatttttcttatgcctgttttgtaaatccctccctcctgcactactaccctcatcttcatcgccaggcaagcactgatctgttttttgtcactacagattagtttgcattttagaaatcttacgtaaatgaaagcataaactgttttttgtctggcttctttctgagatagggtctcactctgttacctaggttggaatgcagtggcacgatcacagcccactgcagccttgacctcccaggttcaacacatcctcctgcctcagcctcccaagtagctgggacaacaggcatgcactacaatgtctggctaattttttgctgtttatttgttgttgtttgtagagaccgtttcgccatgttgcccaggctgatctcaaactctgggcttaagcaatccacctgccttggcctcccaaagtgatgggattaaaggcatgaaccaccatgcccagcctgactggcttctttcattcagcatgtttatatatgttgttgagtatgtaaagagctcatttttaaaaattgccgagtatggatttgccacaatttgtctgtttgttaacctattgatagacattttggctgtttccagtttggggctattacaaataaagttgctgtgagcacctatgtacaagtctttgtatggacataagctgtcatttttcttgggtgaatatgtatagatgaaatggcagggttatatataggtgtatattaatttttaagaaattgtaagtcattttccaaagtacatttgccattttatattcccaccagtaatgtctgaaaatttcaggctatcttgtttctgctaaatctcctttgtaccacttctataaatacgttgtgcatacataatgagagtcgattgaatggattctctatttttttcaattgatccggttgtcttttcttgttgctcataccacacggtcgtgataaagaagctttgtaataagtcttaaaatccgagtattaagccctccaacttcattcttctttttcaaagttgttttggccattctaggtcctttgtttttctagattcattttataatcagtttttttctatattttttcctgcaaaaaaaagacagttgaaatttgatttgcattgacactgtagacagaattgacatcttgcaatattgagtcttctgacccatgaacatggtatattttgcttttgttttttgtttttgtttttgtttttttttttgagacagagtctctctctattgctcaggctggagtgcaatggcacgatctcggctcactgcaacctccgcctcccgggttcatgccattctcctgcctcagcctcccgagtagctgggactacaggtgtccaccaccacgcccgggctaattttttgtatttttagtagagatggggtttcaccgtgttagccgggatggtctcgatctcctgacctcgtgatccgcctgcctcggcctcccagaggcattttttaaagtattctttaattctctaaataatggtttggagtttctagtgtataggttttttgtatcttttgtcaaatttatatctttagatgcttgtgtacatggtattttttatttcaatttttgttactagtatatggaaatacaatatataatagatttttatatatcagtttcatgtcctgcaaccttgctaagtatacttcctagtcttgttagctgtttcatagagattcctttggatttttctatatggataatcatcttgtttgaacaaagacaaatttacttcatttccagctggatgcaccctttatttctcttgacttactgcactagctggaaccttcaatacaatgttgaatagaagtggtaaaagtaaacattgtcttgttctgatctcagggagaaatcattcaatcttttaccgttaagtatgatgttaactgtcagtttcttattatctagatgaggaatttcgtttttatttctagattgctgagaaattattttagtcaagaatataaattggattttatcaattgcttttcctacatttgttagtaaatcatatggttttttttgtttattaactgcttatttgaaaatatttgacatttgaatattaaaccaacctgcttccctgggataaaacttggccatcacattttttttctttttctgtattgttcaattttacttgctaaaattttatttagtgttttttttttcgggggcggagggtttgtatttaaatttataagggatgttcgcctgtagttttctggtgattgtcatgtttaggtatctgggtaacgacgcagacctcaaatgatgagttagtgagttttctccttcaatattctgggaaagttggtgtaaaattgatattgtttcttcctcaagtatttgcaaagaatccaaacagtctctaacagataaaaaagacaaggaaatagattcttccacagagcctccagaggagtcacagacctgatgatatcttcttgctttttggcccagtgacaccatgaaaacaatatgacccatgatgaggagaaaacaaatcgattgaaactcacaactgacatgcttagaattagcagacaaaatcattagagggttattagatacggttgctataactgtatttcacatattcaaaaagtagagataaggaatcgacataactggaaaacacagaattggtagaaccagtaaacagaaaactagtaaggacctaggagctggaataggatagtcagccaacttgatttaattgactaaacattcaaacagtagatacacattcttttcaaatacaaattgaagatttaccaagatagaccatattgtggttccagaaacgaggcttaataactttaaaaggattcaagttggaaatcagtgagaaaaatatctctggaaaatcccccatatgtttagaaactaacacacttttaaataacgcagaggtcaaagaagaaatcagaaattataaaatattttgaaccgaatgaaaatgaaaacccacccattttctattttctattgctgttgtaatcaccacaaacataatggcttaaacaatacacattaattatcttacagttttggatgtcagaagtccaaaatgggtttcatttgggccaaaaatcaaggtgtcatcaggtctgtgactcctctggaggctctgtggaagagtctattcctttgtcttttttatctgttagagactgcttacattctttggctgtgtccccttcctccatcttcaaagccagcaacacagcatcttcaaatctctctgtgtttctcctacctccctcttttgcttgtaatgagcctttcgattacattggatccactgggttaatctaggataatagtctcctcatcacaagatcctttattatcacatttgtaaagtcagttttgccaggtagggctacgtattcacaaggttaaaagcattaagacattggcatctttggtgtggtccattattctgcctaccacactgctaaagcagtacatagatggaaatttacatcactaaccgcaactgttagaaaagaaaaaaaaaaaggcagggcgtggtggctcatgcctgtaatcccagcactttgggaggccgaggcgggcagatcacgaggtcaggagatcgagaccatcctggctaacacggtgaaaccccgtctctactaaaaatacaaaaaaaattatccaggcgtggcggcatgcgcctgtagtcccagctgctgaggaggctgaagcaggagaatggcgtgaacccgggaggcggagcttgcagtgagccgagatcgcaccactgcactccaggctgggtgacagagcaagactccgtctcaaaaaaaaaaaaaaaaaaaaaaaattctaataattgacctcaactttcatcttaagaaattattaaaagaagaacaaacacagaaaaagtagaagaaaggaaataatacagataggaaacaaatgtaacaaataacaagaaaacagggaaaaaatttataaaaccaaaaggtggttattgaggatataaataaaattactaaacctggatttgacttttactttgatatttaacatgaaagctagaagtaaaacaatttaaattgtgttatagatatctggcttcgttgtttttagagacaggttcttgctctgtcacacagggtggggtacagtaatacgatcatataaccatcaacccttgggctcaagcaatcctcctgcctcagcctcctaagcagctaggactaaagacacatgccaccacacccagctaattaaaaaaattttttttgtagagatggtgtctcactatgttgctcaggctagtcttggaactcctggcctcaagcaattcactcaccttgtcctccccaagtgaaatggctgtttttgatagaatttaagtctagtttcctcattttattatactgttttgtttctagtgctaggacctcaccaaactaactcatgtaattcaagctctttgtgaagtagtgatagagcagaaagattttgtcataccatgggaagcctaattaccaagtcaacatacatttcaaataacgacctctgagaagatgcggaaaaacactagacctaactctcaagtgtttcttttggttgccatctctcagtggcccatcattcttacatatttcatcgccattgttattcttttcaggtcattacatcttcattgtaaaatttatcctctcacctgggtttcttctttgtgccaccttagtttcttagataaatcatcatattttcctagattcccatgaagatctgtgaaaggaaaagaggtggtgatttgggacagaataggattcacagcctataggaactctagagggacaaagttcttgcatattatctaatcagaatgatttagtgccaacttgtagatctcaaaacttggaaaaaagtaaaaattgtcaaaatatatcaagaatggatgagaagggattaaaaccaggtgataaggatgggaactctcactgaaagttccattattagaacattctactttgtttatgcacaactctgtggcaatgcaccggggctgttccctgagcattagtgaagtgtctatacttggaaagtcttcgcagtctcagttttgtgtcacttcaatctaagagacccagactctggacacattaatttcaaaccttggaactagggagtttatgttgtattccaaaagcatgtggagctacaagggagacttttttgtaattcagagtctcttacttagccgttatgtggccacaagatcttcagctaatctgcacaattcaggcgcttcaggccaacccagaaaattatctccacaaatgtagaaaataaaacagctttattaattttttaaaaattttatcttgagaccaagtctcactctttcacccaggctaaagtgcagtggtgtgatcacagctcactgcagcctcaatgtcccaggcttgggcaatcttcttgcctcagcctcctgagtagcttggaccacaggtgcatgacactatacctggctaattttttaattattctgtagagatggggtctccctgtgttgcccaggctggtcttgaactcctaggctcaagcagtgctccaatcttgacctcatggtggcatgagccaccatacctggccttatttttttagagacagagcctcactctgtcatccaggctggagtgcagtatattttatttttattttatttttttaagtgacagagtctagctatctatatttatatttatataaggggtagaggaagtgtttgcaattaaccacaggtgttctttagctaaagatctaagaaaagggagagagaaaggaaataaaaggaaaataaagatctctttattataccaaggaaatagaaaaaatgttaaactcttacaacttacttggatgactacctgattaataaataagttagtaaagagaagcaatattaagtttatctaaaaattgctgtcagatttatattgttgcatagctaatagtaggatactctgggattaaagatttacctgtcttatgtagttagcgcttttacattcttttttttttttttttttttttttttttgaggcagggtctcagtctgttacccaggctagagtacagtggcacggtcatagctccctgcaactccaactcctgggctcaagtgatccacctactttagcctcctgagaagctgggatgacaagcttgtaccccgtgcctggctaattttttaattttttgtagaggtctcacttttttgcctaggctggtcttgaactcctggcctcaagcagtcttccctcctcagcctccaaaagtgttgggattacaggcatgagccactgctctcaacctcttttacattcttttaacctacgtggaatgatgctatttttggtttttcgttttttcgggtataaaatgagtactctctatgaactccgtaagttctccagatcctctggagatcagaatcatacacaaaattgtaatgtgcccagtaaaattaactgttttaagaatgtgttccaatagtatttttataaagagcaatctatcctacaatctataacaagactaaagtggattagtcatacaggataaaacagaatttgaaatagtgaatgaaaatcaactttaaaagttttacttttttatttctcccaatttaaaattatcattacaagcattgaagaacaaagagaaaccacttattgttcaagtatgtagcctgcatattagcgttaaacttttctttgtttccttccagtttttacataaatattttacatgattataaatgaagtgtaggtataattttgtgttttttacccttttctgttttttaaccttaacctactctctaaaaatcccatttagtctcattagcctgaatccaaatccttgctactagaagtggctcataaaaatctgtgctgtgatttgcctgttgacagtagatgtgaaacttgaccagtttaattttatccttatgtggattttctaaagataatcaagaaggtttttgttttgttttgtttttgtttttgtttttttgagtcggagtctcacactgtcgcccaggctgagtgcagtggcataatcttggctcactgcaacctccacctcccaggttcaagtgattctcctacctcagcctcctgagtagctgggattacgggggcctgccaccacgcctggctaatttttgtatttttagtagagatgggatttcactatgttggccaggctggtcttgaactcctgaccttgtgatctgcccaccttggcatcccaaagtgctgggattccaggcgggagccaccatgcccagccaagaaggtttttttagttcctatttacttttgaataaaatgtcttaatttttagaatcatgtacatttagctcttttatagttcttcactgcctattcatctttttagaatcttttttaattttaattgtctccctattaattgattgctttcaaattatcctgctacgtagcactaattacgagcttttaaccacttaatcaaaatttagcagattgggtcaagtgtggcagtggctcactcctgtaatcccagcactttgggaggccaagtcaggaggatcacttgagcccaggagtttcagactagcctggacaacatggtaagagaccatttctacaaaacattaaaaaaattagccgggcatggttgcgggtacctgtggtcccagctactggggaggctgaggtgggagaatcacttgggcccaggagtctggggctacagtgagccaagttcatgccactgtactccagcctgggcaacaaaggaagaccatgtctccaaaaaaaaaaaaaaaaaaaattagcagattgactatataagaattttaacagagttaatttgttgttaggacagtcccaaagaccaaaactataaagcttaaattcttgtttgaagttttgtgggggaaaaaaacaaaaacaaacaaacaaaaaaaacagtataaaactaaataggtgatgtgcctataattatgctttttaaatctcggaaataaaataacccaaaatgtttacaatgtctcaaaagataacacataggtgttttttttaactttatatctgtctatactttataagtgctcttcaatgggtgtatctttttatgattagaataaataaataatctagataaagggagattatgccagtgatagcagtaacgtttgtcattcttgtacttactgtgtaacatttctgagtcaggattttagactaaaaaccatgacttaactattagcagtttctttaagagctgatatttctgcaaagaaaaagagagtgcatgttctagatcatgtgtctacacagaatagttcctcaggatgcattatatccctgtctcttaactactcttgactctgctatccctttaagacgtacaacaattttacataaaagtttttctccatattctttttttttttttgaaatggagtcttgctcgatcgcccaggctggagtgcagtggcgtgatctctgctcactacaacctccatctcccaggttcaagcgattctcctgcctcagcctcccgagtagctgggattacaggcacatgccaccatgcctggctaatttttgtatttttagtagaggcacggtttcaccatgtgttggccaggctggtctcgaactcttgacctcaagtgatctgcctgccttggcctcccaaagtgctgggaatacagacgtgagccactgcgcccagcctccatattctaactacctcagacttcagggaaaactatttttaaaaacacatgtgggttttataaaaaccggtaagtttatgaaacttttacattagccctagccctcagtctccaagtccagtgtttatctcttaggttgtatagggatagttgttaggtcttaatttgcaggagtaacaatttgaatccagttaagcccacataaaaagtaaatgaaaaactaagagactcttccatttatggggatgacttgtattacatcctacagataccagaaaaatgttactgtaaggtgcgctctttttgaaatcttaagatgaagtcctttccagttacagaatttttgatgtaacacatcaaaaattgtttccctccaattaactgtaggaacagtaaactgtagcacagttttaaaacttacatagagagaagacagagaatctccctaaagcccaatgattaaacatgtctgttaatttgtccattagacgttttacaaaacagctctgaagaaaaacattttgttccaatagcataaaaatttgcaaaaatcaacctactcatctgacaaagggctaatatccagaatctacaatgaactcaaacaaatttacaagaaaaaaacaaccccatcaaaaagtgggcaaaggatatgaacagacacttctcaaaagaagacatttatgcagccaaaaaacacatgaaaaaatgctcatcatcactggccatcagagaaatgcaaatcaaaaccacaatgagatactatctcacaccagttagaatggcgatcattaaaaagtcaggaaacaacaggtgctggagaggatgtggagaaataggaacacttttacactgttggtgggactgtaaactagttcaaccattggggaagtcagtgtggcgattcctcagggatctagaactggaaataccatttgacccagccatcccattactgggtatatacccaaaggattataaatcatgctgctataaagacacatgcacatgtatgtttatagcagcactattcacaatagcaaagacttggaaccaacctaaatgtccaacaatgatagactggattaagaaaatgtggcacatatacaccatggaatactatgcagccataaaaaatgatgagttcatgtcctttgtagggacatggatgaaactggaaaccatcattctcagcaaaatatcgcaaggacaaagaaaaccaaacaccacatgttctcactcataggtgggaattgaacagtgagaacatatggacacaggaaggggaacatcacacaccggggactgttgtggggttgggggaggggggagggatagcattaggagatatacctaatgctaaatgacgagttaatgggtgcagcacaccaacatggcacatgtatacatatgtagcaaacctgcaggttgtgcacatgtaccctaaaacttaaagtataataataataaaatttaaaaaaaaatttgcaaaaatctggaaatcagcattacctttttgtatttttgtttttattcatattttaatgtagttgaaattaaatgtgtctgtaagagtttagttcttaggtgggggagtccaggtaattatgaatcctatgcagagactgtcgcttgtcctgtcatgctttaatacaagacaaggaggaaacaatctatgtctttgccttgggaagtttaataatactgcctttgcctagaactgctattatttgttcagtcaacaaattcgagtgccctccctgtgcaatgaactagaaagtaaagaacaaatctaagacagtatcttaaatttaattcccccattctagtttaatcagtgttaattatcatgaaaatctgtgtcactctctgtcttccctctccctttttcttcctgactgcttcccttctactcccttttctcccccttcattcctcagcacacccaaattttactgcacctttctatcagtaattgtaggagaagggatatatgccccaacctcactgggcattaggggtgtgtgtgtgtttgtgtgtgtgtgtgtgtgtgtatccagttttttttaaggactaagtgtctcctaaagaagtctgtgctctttctgtccctctttttctgaattattgttttaaatcaagactttaaatagccacttaaacaagatgagtaacaattctcactggctcagtagctgttttttttccaagtatgttaaatatgttatattactgaaggaagaaatattttgtttcatgttttggggttgagtatatttgatatatttgtggaaagaaaagtttatctttgttttttgttgtttagaggaagttccttttgagcttatatttgagccccaaaaatcctccaaaaaattgttcttcctcttttccatgaatgagatttagagctaaattcatacaaatgcaaaacaaaataaaattacagattctctgaactctataactcctaaaaagattcagctatggaagcagagttgaaaatcacaagaattttggaggaaatgcattaaacagactggttatatcaaatcagaagatccacaaaaaatgcaaagagacaactgctgaatatatgtattcagtagaagcctgtgagacaatagcaaatttaaacccacccatggtttccatcctttgaaaaaatttaccttgagtaggacacaaaggaagaatgtcagctggtctattagtgtttccttaatggttcctgaggggaagaaaaaagaataattggtgtgagatgtgtataacaaagaagacatgcagagtattttttaagatggtacagtaattttgaggaaaaaaattaatattaaacgtctcctttttcttgttcccccaaaaagtgtgtgttccaccaaaaagtgtgtgtgcacgttctactgtcataccaaaaaagatgagactgtcccagagtctcagtgaattatcttatatttctgtagggaatcagattagatgataccctttagctttgtgtttatttgcttttggtaatgttccctattaagtggcctttctttaactcttctccttgttcatccttctatagtacctcactcttgtctattgattcataagttgccctctgtagaagcagtttaatatcatcagcttactatctgatggttaaaatgtctttcacttatacacccatgattctgtggaatttgtaagccagatgaattttttaaagccctttgtaaacttaatcctttaatctagaaatctgaaacaatggaataattcagtaaaaattatctattttcttagttttcactctatcaatatgaaaggctaggcaaacagtcctgatctgagatgaaaacagaatgtttcagaaatgctgcctatctaatgaaaccttaattgaagtatccttttgttgtctagaaaacttaaaaataacagaatcctgagcgtattattttttattgcttgaagtaactttagatatctagtctcactcttatactttatagctgagtaatgtaggggcctgagacctgtgacttgcttaagttcacatagttgatgaatagaagtagacccaggtctagaactgaatcacaagtcagttttcttatgtatgtactcatcacatgttgaattacatgctgggatatttctaaccatgaaatgggaagaacgcaggccactggttagaaagctacgagtttgtacccacaacacttgatgttgcaatctctgggctactacacaattgttcacttgatcagccaactatttgtttggtataggtaaagttctcttttatcctgcttaatttgaatataggtatcacttagacctaatatttctcagaatgactttgcagtggcaagtaatgggcctgatcttgtatttcagctcaaatagctataactgtaccaaagacatggaagaaaccaaaagatcggacccgaaccactgaagagatgttagaggcagaattggaggtaagcaaatctcttaagttcatattcagagcagtggtgccatttcatagacaggtatgtgtttatacctatttattgaaatagttttccaagcaaaacttaatatatcaagctcagagactaattgttttaagtccattttatattagaattttaaaaagatttttagtaacatgtttgatttcattgaatacttatttttctttcaaaatacctcttttaaaataacaaacttggccaggcacagtggctaacaactgtaatcccagcactttgtgaggtgaaggcaggatgatcactgcaacccaggagtttgagaccacctgggcaacataaggagaccctgactgtacaaaaatgttttaaaatactagccacacatggtggcgcatacctgtggtcccagctactcgggaggctcaggtgggaggattgcttgagccctggaggtggaggctgcagtgagatgtgatcatgccactgcactccagcctgggcaacacagtgaaacattatctcaaataaataaataaaatgacaatttttggttaaccttcctcttcccccaactagaacttttgtttgtattaactggatagaaagataatctggtaaacaaaaatggagagtttttaaaaataccattagtaatggtggtagaattcatctagtacattataaaggaattgattttgaatctgtcatctgttaactgcatcccagaaacataacttttcttcatatggttgtctgtcttaaaataagccatgcgagattttgcttcagattaaaacataccaagtccaagagatgaatgtgaggaagaaaaaggacaaatcagtcctaaggattactctaacaatttccttgtctgtaatctcaacatccttagcattatgtattgaagcttataaatgaagagcaatgtaaatctgtatgtagctttttccctttttttgactattcttttagctactttattaaaataattttactcaaggtttaacatgataaaattaaaattttactcaaggtttaacatgataaaatataaaaattatcttaagataactttgagtgtgtttacttcattcggcttttttagcaagttataattcttaccttctttgggtatctaacagtaccccttggttacctcccctgtgccttcattgctgttacatgatgctgtgttgatgtcactgttagtcccatagcaaccactaaaatgttgatcgttgtgatttcattgtggttattagggtgtaaaacttggcagtaaggtatagaggtgcaaatagtcattgcactccttttgcagctgaacctgaaaatgttcctcctacagagaataaaataccttccagaggcatgggaatcacatacattcctgctgtggctgttaagagcttcattaacttctttctttttagattcagctggtttttttgttatttttcttctgttatacttcatgttggatttctaagcattattgaatattatataggccactcctccattgccttcaaatattcatcctaatcttcagcttgaggttcagcaaactttttgtgtaaaggtccagatagtaaatattttaggctgtcacaattcctcaaatttgccgctgtagcttaaaagcagccatcaacaatgtgtaaatgaaagaagcaaggttgtatcttcacaaaactttattggtggacattgaaatgtgaatttgtatgccaggaaatatttttccagattttttcagatattacaaatataaatatcatccttaccttgtatgctgtgcaaaagcaggcggtgagccagaattggccctcgggccagagtttgctataaagcttctttagcttgttactcttgaaacacaagaactgttttgacttattttgaaccaatcactttttcttaactttatagtttaagacaaggctgggcgcagtggctcatgcctataattctagcactttggtaggctgaggcaggaggatcacttgaggccaggatttcgagaccagcctggccaacatgacgaaaccccatctctgttaaaaatacaaaaagtagctggccgtggtggcgcgcgcctataatcccagctactcaggaagctgagacaggagaatcacttgaacccagaaggcggaggttgcaatgagccaagattgtgccagtgcactccagcctggacaacagaacgagactctgtctcaaaaaaataaaataacctaaaaaatttttaaaaactaaagcaagacaaaaaatatttgctttttacatagtgacttctttcagaaatccttttttctgtctttcctaaaactgagcttttgttggcatagtgtagtaaatactggatgccattgtcttcatttccactaatcaggctccccctttcttagatttattttgtcagcttttaaaataatttgtttctggtatcagcttatttgggttacatattaggttgttgcattattaaagatatttatcaaaattatagtctagaggctgggcatggtggcttacgcctgtaatcacagcactttgggaggccaagaagggcagatcacgaggccagaagtttgagaccagcctgaccaacatggtgaaaccctgtctctactaaaaatacaaaaattagccaggcgtagtagtgtgcgcctgtaatcccagctactcaggaggctgaggcaggagaatcgcttgaacctgggaggcggagattgcagtgagccgagatcgcgccactgactccagcctgggtgacagagcaagactccgtctcaaaaaaaaaaaaaaaattatagcctagaaaagtaaggatgaaggatgatttcatattaaaattgcttggcaaagtatcttaaaataagttttaaaattttagagcatttcatcaattattatatacatagttgccagtctgattttctagcacttttaaaaaacattgcattaagcacagagttctgtcaagtgaattcttaacagattcctataaaaggtttacctttggctgtccagccaatgaagtcatctctttcttaaatctgtttctgcataaacaatttaggaactgtacagactagttgactaggattttatcctgctttaaaaaaaacccataaatatttaattaagctatttttgttattctcttcaaatacccctcatagtaatacacctcagataattcagtgattctgtgttctctgaattatggtttgttattcatagaactagtttctttatacttctttttccagttagaaattaaatttctaagtaatacagcctctgtttatatatgatagactgttgttgattgtaggtacagagaagaggatgcactgtattctctaaaaaaaagtttcacattttataagatctgaaataagaattctgtataattgtataatttggttatgttgctctttaataagtttaaataccatttacatactgatatctcagattattaaatgtcttcttgatgacctgtacttaattatgagatggtattataagattattataattagactatagtagagtctaaaatttttaaaaatgaggctgctgattcatgattcaaatttggtagatctggttttttcaatgtttaaatgatacctactttctgccatgctttataaaataaattgtttccaaacttatttttttggaatattatgtctgtctgtcttttgagggtttttatatactatctttttccatgaattagtcgggggaataggtgtggggtggtgtttgtgcatatttgcatgaactttttatttccattattagaaacagagtctaaaaaccatctgtttctgttgataacattaaacaatttattggcttttcaaccatgatctgttatatggtaaaagaaaatttactagtattatatctgttttaatactatctaacaaagaagtatttgtcactcaaaaattgttttaaacataatttcatagattatttggggtgaacttttttctgctatatatgacactactttacactatcctctgctgaaccagctccagtttttggctcttctcctcgtgtgaatttatcaattagaacacctctgagtagttgtttcagaggattgttttcagagtgcatacccatcgtgaaaagagttcacagagaactttgcctcaaggagttttgaagattcatgaggcctttacagagccatttgtgtttgatatctgacactaagatggtcaaaaataatctagggaataacttcaattctttttcgccttctgaaaataggtgtgatactccataacccagatttctcttttttttttctctctctctctttttttttttttatatacaagatttttctatatggtcacagcctcagagaagtctaagaacgaataacaaaatagattttaactagcaagtggcctttttgtaaaatgagatatgatcagttttataggacttagatgttttaagctattctccagactgtcaatttcacagccagaagacagtgtaaaaaataccctccagtgtttctttttatatttgttgagctttaatggcaagggtagtgtagtgcttgttttagattctgactaggactctttcatgttcataaagttccatggattaacagttctttccattctaacctttggtatatttggatattattagtctcatgttaaagcatttcagcagccatttgaatggtcttccttttcctaggtgctgaaatgagaaaagtattttttttaaactcagcattctaataccacatgctgaacacagacattcttaccttgaatgacatgttttcctttgctttttgaagggagtagatgtaggtttttatgtatatttacacccgtggaaaaaaatgtaacctctttgttcatttattatttagcttaaagctgaagaggagctttccattgacaaagtacttgaatctgaacaagataaaatgagccaggggtttcatcctgaaagagacccctctgacctaaaaaaagtgaaagctgtggaagaaaatggagaagaagctgagccagtacgtaatggtgctgagagtgtttctgagggtgaaggaatagatgctaattcaggctccacagatagttctggtgatggggttacatttccatttaaaccaggtaagtttatacctgccttcctatgtacctctttatccctctactgcaaccttagagaaatgttgcctctttttagagagatactggatggaagaaagaggtttatcacaatataatatttacaggacagatcagcaagcccaagttagtgactagcaaatccagagagttctgtattgctggaaatgatacccgacactggtattccccttttactggcattggaagagcatctggcagagggaatcagacagtgccatgctagtgggtgcagtttgattttaaaaattattgcattcgttttaattgaaagggatatagagatattaccacattcctcgagatggcgttagtcatctttcataagacttgatctctgttgacagaaatcactctgtggaactgaattctgaaacaatgtattgagtacctgcagtatgggaagttccctgtggtaaatatgtatgataaacaagtaaataaggaatatatatgataaacatatggtaaacaaatataaaccctggaggatttttttatcttcagataccatcaaatgcattaaacctctgtcataatgctatataaactgtgactgactttgagatatatggagagatttggtatggatctgtaaggaaagatggttcctttgacagaaagtttgggctgggtgcggtggctcacgcctgtaatcccagcacttagggaggccgaggcgggcggatcacctgaggttgggagttcgagactagcctgaccaacatggagaaaccccgtctcgactaaaaatacaaaataagctgggcgtggtggcacatgcctgtaatttcagctacttgggaagctgaggcaggagaatcgcttgaacccggaaggcagaggttgcagtgagccaagattgtaccattgcactccagcctgggcaacaagagcgaaactccatctcaaaaaaagaaagaaagaaagtttggagtaggtgaaaagttttccttagtctgccaaatctagactaagttttgcaggaggtggggtttgagtgtaaaataccagacctcaaaggtaatctagatcaatatttttcaaactgttggatttaatacatttaatagattgtgaaattaataggtcacaaccaacattttaaaaaaggataatataataaaaaatgtcagtctattacatgtaagtaagaataagtattgtttttagaaactttgtagttatatatgtgtttataattgtcccgggtcatgaagtcattatgtcttactgtgagttgtagtcagagatgtttgaaaaccaatgactagtacttaccactttattttatattatttttaaaagtttttatttattgtttattttttacagagggagggtctcactatgttgcccaggctgctttcaaactcttgtgctcaagcagtcctcctgcctcagcctcccaaagtgctcccatgcccagcccttaccactttgatatactgatctttcactaccagtaaaatcctgttaatgggctttatgaaattgtaaatttatgctatcataaaactttttttaaaaaaaccctaggactcagtgtactcaattgcttttgtcaacttaggcttgtatactgtgttcaaaaataaagaaaaagatctaggcttgtaccaggtcacagagtacttgtagccatcaccaatgtgtcttaagaaaatggaaacactattgctatttttagactatgcaaattatatttttatattaatttattttatgttttaatattttgtatattgcataatttatgttacttatattttatattatattttaattcttttcatccatcagttttacagtataggccctgactataattgaccaactaccttttgcccttgtaatatttaacagcagtaattggaaaaaagacaatagtcattggaaaaaaaacagtttgaaatttagatcccaataagctgtctactttttaataaatataatagggtaataaagatatggtggaaaacatttggaatattctcaaagacccatcagcgggtctataacctacacattaggaatctctaatgtaagaaggatccaatctgctatcaggaagtaatctggagtctgattttgatgagttttattaattaaaataagaaaactgtgatttttttttagatgaaattataggcaggagaaaaaacttagtatctaactgcatagacagttcattatcttaaataagttgtttctgtgttttgtgtccttttgcttttttttttttctctaaaataacatttcctagtgaacaaccaaagtagccttttttatgaagccaagggttgtatcaggttccttatttcttagttatttaagttatttagttatttaagtcttatttctaagttatttatttaatgaggattattacatgtccctggccaaaggttacttagtgtgtatgtgaagtgattcctacttgctttagattattttactactcaaaggtatttagaagggatgaaagaacaagtgatggtttaaaatctttacatattttctgactgtatttcattgttcccttctattttttgtttgttcatgaagagataaatactggaatgtggtttgtactcttagggaatgtaggtcatgcatcatttaatgacggtgatttgttctgagaaatgcatcattaggcaatttcttccttgtgcaaacaaaagagtatttgcacaaacctagatgttctagcctactacacacctaggctgtatagtgtagcctactgctcttaggctgcaaacctgtacagcatgttgctatactgaatagtaggcagttgtaacataatggtaagtatttgtgtatctaaatataactaaacatagaaaaggtatagtaaaaatactatataaaagatttaaaatggtacactgtatagggcacttaccatgaatggagactgcaggacttgaagttgttctagatgagtggtgagtgaatgtaaaagcctaggacattactgtgtgctggtgtggattttataaacattagggcacactacatttattttaaaatgtgtactttctctaataatgaattaatcttagcttaccttaatctttttacttgataagctttttaattttttaactttttgacttttataataatatttagcttaaaacacactgtatagctatgcaaaaatatttctttttcctttttctttttctttttctttttttttttttttttgagatagaatctcactctgttacccaggctagagtgcagtggtgcaatcatagctcactgcagcctcagcctcctggactcaagtgatcttcccacctcagccacctgatagctgggactacagttgcatgtcaccatgcccagctaattttttaaaattttttttctagagattaggtcttactacatcgcccaggctggtctcaaactcttggcctcccaaagtactgggattataggtgtgagccaccatccctggccttgtttctttatatccttattctatatgcttttttctatttttaaaattatttatctttttacttgttaaggatttttcttaaaaactaagacacaaacatatattagcctaggcctatacacggtcaagatcatcaacatcactgtcttctacttccagatcttgtctcattggaaggtcttccggggcaataatatgcatagagctgtcactctattataacagtgccttcctctggaataattcctgaaggacttgcttgaggctgttttacagttaactttttttaataaatagaaggaatatactctagtgatttaaaagtatagtacagtagatacataagccagtaacgtagttatttcttgttactatgaaatattatgtgttatacttgattgtatgtgctatacttttaaatgactggcagcacagtaggtttgtttacactaccattaacacatacatgtgaataatgcattgtgctgccacatgaggatagttacagtgtcattaggcaataggaacctttcagcttcattatagccttatgggctataatgttgtatatgcagttgtatatgcagtttgttattgatcgaaacatcgttatgcaatgcatgactgtatataatgccctacaaacagtgtctgcctatattcctctttctagaatcctggaagcctactgatactgaaggtaagaagcagtatgacagggagtttctgctggacttccagttcatgcctgcctgtatacaaaaaccagagggcctgcctcctatcagtgatgtggttcttgacaaggtaagctgcgtactcagagaaaactagttctttttggtgggaactgattttaactataagagcaaatatgtgaagtatgagcagtttttagtaattgttagaccaaatgatgtaaaaatatctaatgtttaagaatttgtttccctaaacactgttggattttgagtttcttataggttacagtcattttgggatttggcccatgttggagtggtggttttttttaatgtttattgatttatctgcttattatggctgttttttggtgaaataaaaaattttgtgtttgttgggggaaacatggctaaattgatacggaggtctttcctcattgttctaaaagttcattatggaattctattggcattgaagacaggtcagaaatctaggaaggtatttggcagatcaaacataagtgagagtcaacatgattcaaataatatgtatctcaaagtttccctaatagatacctccagtgattgaattctccaatcttgtgcaaataggcatccttcctctttgcatctgatctttatggtgcacacagcaaattagtacagtcagtatttgtttactaaattaaaaggagtaaagtcagatctactaaagtaatttcatcagagctgatgattaagcttgaagtatttttgttttgtagaggaacagaaatgtaaaagtagagattaactatcttatggaatcatatctacctcttaaccgatttatgcctagtgtttcattattggaatgctaagtttgtgagagttatttatatcctactgctcaaggtcataaccaaggtctgaattttcacgcaaaaaaatttgcagcctccggcataaatgggttagtaaagatgtccagcagctgcttatccagaactcatttatactattttactttcttatagcaacaggtcttcttacttctattggtggtatctaagtcttctctcctagatacttatgtgaggacagctgaatgactgattaatggtgctaatttgaggctacttcagtacctcagaagtcaagtgttatatccaccaaattcaattatcctcttagaaaatattcctgcctgtcctgctgccttatctgtttatgactttggccactaattagttgatttctcactgatctgcttaactttatgttgtccatggtcacattacatgcttattcaaagtcagatatctcagattaacaaggcagacagtgaaattttaaatgaatcatcacctatgaaacatgtctcctctaagacttattgtccactcatagtacattctttactaaccataagtctacagcatcaaaactaaaatgagcagtagcaggattcgtataggcaagtgctctatatcctggtgaatatttttttttaattctaaaatttgaccctagtatagaggatctcaaaatatcttgtcttgtgccattcagttggtcctcagtatctagtgagccagtctgctgattatgtatagcccctacttggaaatttaaggcctaaatcattcccagcgtatcagaaaaccattgttttagcctaatggctctaagagtagcccaggagaagctgccatggatgagattggacttctgcgggttccaaagctggtgcttaccgtttcagctgatgtaacttttcagtaaaaatttttgttatcttttgtggcagggaatgctctggaacatgtattaagctttcttttgctttttcatgcagatcaaccaacccaaattgccaatgcgaactctggatcctcgaattttgcctcgaggaccagactttacaccagcctttgctgattttggaaggcagacacctggtggaagaggcgtacctgtaagtgcaagttccctacaactcacttagttagacactggcacagactccatgaaatcctacctcatggcaagacagcagcttttattcgttgattctagtcaagaagaagaagaagaggcaaagactatcctttccatactcatattaaagcagataaagaatacacttgagttctttttacttggcagaagctagtctgcattaatttggtcttgattttttttttccctattttttcaattgaggtgacctgcaaataggtttaaaaatagtgccaaccatggccagggatggtggctcaggtctgtaatgctagcactttgtggggtcaaggcaggaggatcacttgaggtcaggagttcaaggtcagcctgacaacaaagagagaccctgtctctaccacaaaaaaaaaaaaaaaaagaaaagaaaaaaataggccaggcatgctggcgcatgcttatagtcctagtcccagctactcgggagactgaggtgagagaattacttgaccccaggaggtccaggctacagtgagccatgatcatgccactgcactccagtctgggtgacaaaacaagaacaggaagtccaggcttcagtgagccatgatcatgccactgcactccagtctgggcgacaaagcaagaccctgtctctgaaaaaatatatatacagagcgagccaaccttgataagattcctgttttgttttgaggtgtcctaaaatactggagatctctgatgacattcagctaatgatcatgtctttgtctttgtttctacagatttgcaaagtgcagagcaggcatggattgccaattctggaacagagcaaagccccaacttgccctccactggtgatgtcacacccacccatgaagagcctgcctctaggggtgcgctgaacactttgttttttgtaataatagtctctggtgttataatattttctgttacgctctttttatttactattgattgttaagtcaaaattttaacaaatgacatgtacaaaagagtgcagtattggtaaactgcagattgccattacacccccagtggcaggctctttcagcggtggaagtggcatcaccagtggagttatgctggggcactgcactgtgcaggattcggcaggctctgcctactccatgctttgtagacttgcagaaagcatggggaaagttgccaatgatgttgaatgtctcttttccccaagttagaatggcatagagagcaataaatctaacattttggaggagcttggggtttgatgtacatttgcagataaccgtgttacttcattttatgtaaggtgacactttttgtttccgcatcacctttttatttctgaaatggcaacttttgaaacctgctttgaaataagactacattgtctgaaaacaaatgtcactttgtagatatttaaattatttgattattttcctgcaaccgaacagtgatggcgtatacttgaatgcctacagtgtgttggaggctttgtaaaactaccgaaaaccacctgaatttgaagcatactgtttattgagccattaatccatcaccattttagagacctgtgtatgtgagatactctgtttctcacacatttatctattttcaggaaatactaaattaaaatttttctaaatcttgagttacctcaccagaaagtcttagaaagcagctttctagaaaccattttatacccttttttttttttttgagacagagtgtcgctctgtcgcccaggctggagcgcagtggcgtgatctccactcactgcaagccctgccacctcctaggttcacgccattctcctgccttggcctcccgagtagctgggactataggtgcctgccaccacgcccagctaatttttttttttttttttttttgtatttttagtagagacggggtttcaccgtgttagccaggatggtcttgatctcctgacctcgtgatccacccgcctcggcctcccaaagtgctgggatgacaggcgtgagccactgtgcccggcccattttataccttttttttcagtattatttccctttttaatgttgaaatttttatttgtgttactgttcattttggttttggtttatatctttgttttgccaaatatttgaaataatgttgatgctattttgaatattctgtggataatagcatctgtggttattatcatattgcccaatgttgttgatatgtgactcacaaaatgtataaatcctcttccagtgtcacttttcactaacagcttgctagtcattgtttgctaataactagttataacaaaaaggaaatattgtgagtttagaataagcaatgtctcttttaaattattgaaaatagaaaatgattttcaaaagtaactttatcacagcatataccactcctctgtatacctacgtatgtgagatcagtgagttattctggtacactcaaagtaatgtgactagaagtgagatgttatctagaatttgtagtagctccaaaaagatcaactttaattatttaatttacttttattaagcagctttgttctgtgtcagaagctagtttttaagagaaattttgatgtctcagggtaatgttgatatgttaagccttaacacaagttattcttccagcctatctcctagataacagacattctccacttaatttgcccagcttaccttggtatattgatgtagatacagatgggaatgtcataggacataaatatcaacatataaaggaacaaaaatggccaggcacagtgactcatgcctgtaatcccagcactttgggaggccaaagcgggtggattgctagagtcccggagttcaagaccagcctgggcaacatggtaaaatcctgtccctacaaaaaatacaaaaatttgccgggcatgagggcacacacctgtagtgccatctacttgagagactgaggtgggaggattgcctgagcctgggaaacagaggttggagacagaggctgcagtgagccaagattgtaccactgcactccagcctgggcaacagagtgaggctctgtctcaaaaaaacaggacagaaataatgctgtttggaaaaaagcaacagccctactctttgcagtttctgattccatacttcaaataactttttccagttctccaaattatcttataattaattatcacttaatgatattaaaatctatgaggtatgccccattattatcttaagtagccatgacttctaatataaacttttctacagctcatgcctgtaatcccagcactttgggaggctgaggtgggcagattacatgaggccaggagttcgagcccagcctggccaacatggcaaaaccgtgtgtctactaaaaatgtgaaaattagccaggcgtggtggtacatgtctgtaatcccagctactcagaagactgaggcacaagaatcgcttgaacccgggaggcggaggctgtagtgagccaagatcacgccactgcactccagcctgggtgacaaagcaagactctgtctaaaaaaaaaaacaaaaaaccaaaaactttgctgtaacagacttgctataaaatatttttaatgtatgccaatgattttaaaatgtcatatgcagctacgtagttttcaaacctaagtgtccttcactggatagtaaagtgcatatctgttggaaattaccatgaaatatcatgtctttagttatttttaaaataaaattatgggccgggcgtggtggttcacgcctgtaattccagcactttgggaggccgaggcaggtggatcgcaaggccaggagatcaagaccatcctggctaacacggtgaaaccccgtctccactaaaaatacaaaaaattagccgggtgtggtggcgggcgcctgtagtcccagctactcgggaggctgaggcaggagaatggtgtaagcccgggagcttatagtgagccgagatcgtgccactgcactccatcctgggcgaaagagcaagactccgtctcaaaaaataaaaaaaataaataaaattacttatcagttgtgttagtagtctttttgcggacatcacagaaagcactccaaaaaatatatcttaagaggagcattggacctatataagtaatttgccatttatacttattttaactaacttttgagataaactgatcaatcataaaaatcctagcagcaaagaagaatcctaggagtaaagtctttctttaaaggaacacttggttgtcttccttctttaaaaatttaggtgtatattgattctcttttctttggttatccaagtaggcagtggaatttaagattacagtctctgaataagataggaatgatgtatattaaattgcaaaacggagatgggtataatttcataatacatttttgaaaactgacagtgggtaaaaaatgcaaactttaacgtcacctgaaaaaagaaaatggctcactaatcaaccccagactttgagatttttagttttgacattgtggaccttgagcacattataccttaaagttccttaaagtactgtctttcaaagaaagaaaccaggtgtcgtttctttttgtgtagcccatacctcttagcacaggatcctagattttttgtgtgtttagtatataaatcattcatcatatgttgctacttctgaaggataccataaatttgattatctgtattaagattttcacacacaaaaagggacatgaaatgtttaaatttatgtatcagttttttaaaagttccttttgatcctttggtgttgatgataatatagtttttagggtccttttacatggtttatatcctataatcacaataatgttttcaggtagggctggcattgtatatatgagaaaacaacaaaactaagagacttgcctatagtaactttgctcatatatagcagatttggactctagattctgattcttttgtctcctaagttcactacaccacagttttccaggcattgctattccaaacagtgaattcattctcagagtgtaaatatgggcacattagagattgattaattgaacatattaagaatttgtaagtatagtagatctattaatagctagataaatatttgagaacagtgtctttatcttagttataaccagagatacaattataatttaaaattttttcttgggtgctttcacgtgggttataattttaactattttatcctggactaacaatttatcagttagcttttcaaagttttttttcctttgaagcattattgttactttctcacatctctctgttgctcatttgaaactcacacatatttgtcttgggtcaggtaaagaggtgtggaataaatcatattgccattttccagattcaaatctcaaggcatatttattcattggtgtttgcagtaggttttggtaatgggcattttctgactttgtctcctaatgtgcatctatggctcttaattggttttgacataatttcctttcattgcatccagaaacatttgttcttgacaatgtttatgtacaaatgcatggattaaattaaatatcttgtgatataattgtttacctgaggtttagccaaccatttagtaagttattaatccatataagtcaacactagaatataacttgaattataaaaatcaggcattacttgattaccacatttttctatcagaattgtttcttctgggctactatattaaagtttcagttacaatttatgttcttatagtagtactgtctggtttaacaactgttccctgttggtatttttccaatctgatgatctttatttcctttcagttataccatgtgtctcatacctctgggtttatctgacctgtttgtttttttttttaatgtttatcaaataatctgtgatatcatcagtactgtatccttagctggatgcatttgacaagattggtgtgaaattttgcagaaaccctaacttttgatcctgatgcattcttgatactaccatttctaattggggcagatggtgaagcataaaggaataattctgagaatgattgatgtgtaaaggtgtttgagcttatcagcttaggccccagactgtgttatcgcctagaaactgtctttttatgtaatgaatgacattaaagtctagacttttttctctgaagcgttaaatgaattcaaaagggcagcattggggccttaagtgagaaatgattctcatctatgtgtgctttgtatgaagtttttattctctcttgaaatctaatggctagcccttcagtgcaactcagaaagaaaaaaaaaaaaatctggtggcagtatttgcccagcactaacagaatgatatatcagaaaaagtaaaggttgtcaacatgcagcaggtctgcttgaaggtagcagagcttagtatcaacccaaatatttaaccttgaaaaattatttccaagcatttaagatagtaattatgaatattttgatacacaaaatgcaacttttaacttactctgttatctctacttagtgtgctggcagtataacatggcaacatacattggttttaacataagggtatagtgggaatccagcaggaacagagcagacaaataaaaggaagccttttttttcagggagtaatttagtttgactctcattgatgatatataacgggcttattttagtatttctgacccagcataatgagtggaatcttttatgatctacagtaaggcttagtgatgatattaaatttgcattttaccctgggattgtagaaacccagttttagcagatttgtaactatgatgatacctacctgtgaatttttgtaattattgaagtgaccagtccacagttattcaactaataaaagataagcttaaattaggactagtctttctcattagaagtaacggctttgtcaaacatctggttcaaaaaggcctcttgttcaaaagttgtagtggtggagaacattacattgatggtattctgaagttattttttttacccccaaaaaagattacctccagtttgagtacctagtacccaatctttgcatctagcattgcttggcgtagtcatcagacttgacttgaacagcacaacaaagccaataaattgtaagtactctgaatagctgtaatattcttgtcctagttgttgaatgttgggtcacgaagatctcaacctggccaaagaagagaacccagaaagatcatcacagtttctgtaaaagaagatgtacacctgaaaaaggcagaaaatgcctggaagccaagccaaaaacgagacagccaagccgatgatcccgaaaacattaaaacccaggtgagaacaaaagcatatcctaacattcttttgaaattatattgattttgttttaacttattttgctttgctaatgtttctagagataatcagtttaagactttttataacattttcctattaaaagaattattctaaaagccattatggatgccaggcaacctactgttttctcttgaaattgctttatgtgtattttttcagaatagttaccaggtctagagggttcatgtgtcatagacttatgtaattcaggcttaagttaatatttgcttttctttaaaatacatttttagattctcagtgattgagtctctttatcctatttatcctaattattacattgctttatgttccttgtcaggccttcattgccaataagctagaatttagaaactcatcttgttttgaagccttttggaataaaatttaattctttgaatctttttatgcatatcctgccctcagaactatgaggataaattgaatggatttattttattgacacaaaattaatttttatgtatcagattatataaagcctttatttatcttttgctttatacacaatgtcaattcctatccccaagttacctctgcgacttgagatgtttttgcttctaggcaccaaaactggagtctcttaaaattcacacttgtaccagagccaggcatcacagatcacatactaacttttcagcatctggattccttatatatcttttctctcaccatgaacagttaagtgtagcagttcaaagttccagctctggaggcagagtcctgactctgttaggcaggttcttaatctcaactataaaatgaagttacaaacattgagtgcctcatagggccagtgttaagattaaatgaaataaatataaaccatttggcatggttcctggagcgtggttaagtgctcagtacgatgatgtccctgagatcagagatgtgccttagatatctttttgattcagtaccatcacataacctcagagagcaggggatccccaacccctagtaccagtcagtggcctgttgggaacggggccacacagcaggaggtaagtggtggcaaaagagcattaccacctgagctccgcctcctgtcagatcagtggcagccccagattctcataggagtggaaccctattgtgaactgtacatggaagcgatctaggttgcacgctccttatgagaatctaactaatacctgatgatctgaggtggaacaattttatcctaaaaaccactttcctcttccccgctcaaccccacccccaaccctggtctgtggaaaaattatcttccacaaaaccagttcctagtgccaaaaggttgaggaccactgttagagagagtaaattctcagtaaataattgttcagtaaataagcgaacccacagagtagttaatacaaaacaaagatgaagatgaggcaatccaacaactagccatgctgtcaaactgtacttggcggtttgcttttgtttatctctttagtgattatccccaaacatttgccacagggttcctaaggacatccttcatcacattgctgagataattctctccatttcaacatatctcaaccttttttggaaaaaagaaaaaaaagtcttttttgtccttctctccaatctccgtgagaaatgcttaatgataatgggcctaaatggcttataaagatagttaaaacttcctactggatcttcatcattgacagtgaagatgtatttaaggcacttggattaatgctttactttattaaattcttactgtacctataatgaggaaatagatgttatccttttttttcatgaggaaactgaagcttcaaaagttgtcaagcgtcatgaaagatactaaatagtccagttgttataactcgtaatctgtttctgtttataacagagtcctctccgttattgtcttatttcagaaacagaataattatcttgatatgaggcagcattaattaataggttttctttagtaagtagataaaacaaatctaatggagaatttttaaaattcctttacagagccagtacaaccttcttttttcttgacactttcttttaaatatggacttgctttgttgccttcccttacgttcctactactatattaaatcagcattgtgaacgaccactgttgatgaccttattctcatcttcttgaagcatttttaggatatcattgcctcaggacatgtctgggcttctacccctaggattccctgcattctctttcttctttctcctctattacaacatttctactgatgctgcctgagtcatctacctgaaacactgatttttgtctttccattcgagctttttaacctagcattcaatatgtcattttcactcacagccagtgaaaactagtcttctgatatttccagcttgttctctcaattagcaagctagaaaatcctcattaacaattccttcctaaagtgttttctccttcataaaatatctactttattttttttcttccctttacctagctctttctgtcctttattatctggcccaattctcatttccttctttttttttttcttttaagatggagtctcgctctcgctctgtcacccagcctggagtgcagtggtgcgatcttggctcactgcagcctccgcctcccaggttcaagtgattcttctgcctcaacctcccaagtagttggtattacaggcgtgtccaccatgcctggctaactttttatatttttagtagagaccaggtttcaccgtgtaagccaggatggtctctatctcctgaactcgtgatctgcccacctcggcctcccaaagtgcggggattacaggcgtgagccaccacccccggccctcatttccttctaaaggcattcctcgactaatccagttcctctgacctcatgtacctaaactattcccctttctggtctctaatcaaccctagtacttgctttatcacttcgtttttaaatgtattgtccctgcaactagattttgattctgtagaaggcaataactgtgtttcgtgcttcatttgtacctaacacagaatttactggacatcaactagatatttagttatagcgaaatgttttttttttttttgagacagggtttcactctgtcaccaaggttaaagttcagtggctctgtcacagctcactgtagccttgacctgctgggctcaagcgatcctccctcctcagcatctcaagtatctgggactacaggcatgtgccaccatgcctggctgatttttttgtagagaccaggtctcattctgttgcccaggctggtcttgaactcctgggctcaagcggtcctcctgctttagcctcccaattgctgggattccaggtatgaactaccatgcccaggctttttttttttgaaagagggtcttaaatctattgcccaggctggagtgcagtggcacaatgatggctcgctgaagcttcaacctcctgggctcccacctcagccttccaagtagctgggactataggcatggaccactatacctggctaatttgttaatttttttttgtttttttttgtttttttttgagatggagtctcactgtgtcgccctggctggagtacagtgacgcgatctcagctcactgcaacctccgcctcctgggttcaagcgattctcctgcctcagcctcccgagtagttgggactacaggcatgccccaccatgcccggctaattttttgtatttttagtagagacggggtttcaccacattgaccaggctactctggaactccgggcctcaagtgatctgccctccttggcctcccaaagtgctgggattacaggcgtgagccactgctcctgggcctaaaaattttttagaggcagtgttgcccaaactcctggcctcctgcagtcctcctgccttggcctcccaaagtgttgggattacaggcatgagctcctgtagcttatccaataaatgattttgtgtgtgtgtgtgtgtgtgtgtgtgtgtgtgtgtgtgtaatttttctttttttggagacagggtctcactgttacccatgctggagtgcagaggcatgatctcagctcactgaaggcttgacctcccaggctcaagcgatcttcctgcctcagccccacaagtagctaggactacaggtgcttactacacacccagctaatttttgtattttttatagtgatggggtttcgccatgttgctcaggctggtctcgaaacccctgagctcaagcaatctgccctcctctgccttccaaagagctgggattataggcatgagccactgcacccggcctcatttcattctttcagcagtgtctttcacagagcagttgtttttatttttattttattttattttattttattttcattattattattttttgagacagggtctcactttgttgcccaggctggagtgcagtggcacaatcacagctcactgtaacctcagcctcccctggctcaggcagtcctccctcctaaacctcccaagtagctggaactacaggtgcgtgccaccgtgctcagctgatttttgtattttttgtagggacagggttttgccatgttgcccaggctggtcttgaactcctgggctcaaacagtgcacccaccccagcctcttaaagtgctgggattataggcatgagccaccatacctagcctgtttttaattttgataatattgaattagtcaaccttttctttcatgattgtgcttttgctgtcatatctaagaaatacttgcgtaaacccaagaaaacaacacttttctactatgttgtcttttagaagtttatagttttaggtttcacatttagctttgtgatccagtttttgttgagttttgtacaaggtgcaagataataggtcagggttctttttctcccctttcttgtggatgtccagttgttccagcaccatttgttgaaaagattatcctttctccattgaaatgttttggcatctttgttgaaaatcagttcatcgtatatgtgtgcatctatttctagactctacattcttcttcatctagctatgtgtctgtcctctggccaacaccactctgtctttatatagaaagttttgaaatctggttgtgtgaattcaattctccaactttttgtttttcttcaaaattatttaggctcttctagggttttgtgtgtgtgtgtgtgtgttcatataaattttagaatcagctccttgttttctacccaaaacaaaaaacaaaaggccctattaggatttggattatgatgatatatctgcagatcactttggggaaaactgacatcttaacaataatgaatcttctaatacaagaacatgatatatatcttcatttatttaagccctctttgatttccttcatcagtgatttatagttttcatatttttttccatcttttttgttttgagacagagtctcactctgttgcgcaagctgcagtgcagtggtgcgatctcagctcattgcaaccgctgcctcccaggttcaagtgtttcttctgcctcagcctcccgagtagctgggattacaggcatgcaccaccacacccagctaatttttctatttttagtacagatggggttttgccatgtcggccaggctggtctcgaacctctggcctcaagtgatccacccaacctcggtctcccaagttgagattaaaggtgtgagccaccacgcctgaccttttgctagtttttggctaaatattttgtagattttggtgctgctgtaaatggtacttaaaaaaattaatttctggttatttattgctaatacatagaaaagcagttgatgtttgcattttgacattgtatcctacaattgctagactgacttattctggtctttttgcagattccttatgattgtctatgtagacaattatatcttctctgcatagagttttatttcttcctttacaatctacgtaccttttattgctttttctttgctttatttcattgattaggacctctggtatgatactgaatgggaatggtgaaaagaaacattttttgcattattctcaatcttaggggcaaaaatcattttgcctttcacctttaagtggagttgtatatctccttttactagtctaggaagatctcttctattcctgttttttttttttagagtttttacaacattattttaaaagactcctgcctagtgtttcataccattatttatattataccataatttagacaaatttctatttttttacatcaaagttattttctgtaatgagttatgtggctaaagtatttttacgtatctctaaatataaatacatttctaaaagtgtaattactggttcaaaggttacatacacagttttaaagcttttgatacacgttgtcaaattgcccttagaaatgttaacagataatgctcccaccagctaagtgtgtatatacctatttctagaattctcctcagtagtgaaaagaaggtaatttttgactatttgttaaaatagattagtttaattatttctgtcactagttcacagtccttgttaataatttgagaagttgaacttatatattatttttaaaattaatcattacagaaagcaccatattgtcacagttactctaatgcttttttcttttttgtggcccttctaggagctttttagaaaagttcgaagtatcttaaataaattgacaccacagatgttcaatcaactgatgaagcaagtgtcaggacttactgttgacacagaggagcggctgaaaggagttattgacctggtctttgagaaggctattgatgaacccagtttctctgtggcttacgcaaacatgtgtcgatgtctagtaacggtaagaagagaggaaggagtaaaacgagaaatcttcaagaggtatattctcccctcactacacattcttcccagaagtgttattggggcaacataaaggggagaatatatttttagtatttattgatataatattctcattattaaagacaatcttgctttattaaaacgtatactcccctctggaggggatatgaagtctggactgaaatgggcatgagatgggcccattcagcgtaagaaagatagagtcaggtttaaattagtaatgtaaaattatcgtcatgggcaacaaatttttcccgtgtgtctcttatggaaagcaagcaaatgcgtgctttcacatttaattaagtttgaaatttaaaaacacgttgattctaattctaatctctgtgaaaatgaaaggatagttgttctgtagtcaaaaaggtttcaaagctgataatttcatgtcatagaaactgttaggtttctctccgtttacattatctgaagccatttaatctccacagcctgtcaaacctagggcaagacagagagggagaccaaagagcttctggttagtgttcattgtcctctattccacagtcataaactgccatgtatcatctgttttctcttcctgttattgttaccgaggtacttgtgtcagaaatgtctgtcctttaacatttggattttttcttaattattacaactcattgtcgtgccttgctgcttagaaacaagctatgaaaatgcaaaattctctcattctaccaatatttttgactacctatgtcaaaggtaggtaagtcttttggggtttggaaaagtcacatcttctgtcttaaaggaattcaaaatccatttgaaaataagtatttccaagaaaaaaattacttaaaaggtattttgtgatgtagcagtatctcaatgcctgaatggatggttagaccgaaaaataagttggaagaaaaagaaaacactatgttggtgggagagtcacaaaacttttataaagcaaatagagtttgagttggacctgacacaatggggaatacacatttggagaagaaagaacacattctaagcaggctcaagtctgaagcagtaagtgtggctttggagtcacagctctaggtttaaaatttaaagtttaaaattaaattccaggctgggcaaggtggcttatgcctgtaatctcagcactttgggaggctgaggtgggcagatcacctgagatcaggagtttgagaccagcctgggcaacatggggaaacttcgtctctactaaaaatacaaaaattagctgggtgtggtaacaaaaattagccaggcatggtagcgtgcgcctgtaatcccagctacttgagaggctgaggcaggagaatcacttgaactcaggaggctgaggttgcagtgagcagagattgcaccacaacactccagcctgggcgacaagagtgagactctgtctcaaaataaaataaaattgagataagagaagatagtttctactctgccacttcctaactttatgaccttagaatagttactgatctctttaagcccctgtttttaatccataaaatgagattaattcataccacttgtaatattataaggataaaattaattaaaataaatgagattacaaaatttctagcccagtgtttggcctgtagtaagccctaaataaattgaaactatgttagaccttttaggtccaatttgtgaaggttttgaatgttggctatagaatgaggatgattattataataaaaatagtctattcagcacctactaagttgcaatatggatagaggctttatatatacatattatttttaatggttattctaatcctgaatggtcagtgttactagccccactttattgaaccaaaagctgagcttgaaaaggaaaaataacttctcagggtgatgtaactagtaagtggcattgctagaattcaaatcagggattatttaactcaatcacttgccatagtgcctcctgatgtgccatagttatatggaagcaaactaattctccatttctgggctctcattttcattgtggtagccatgacatccatgactcattaaaattaggactagatcccagatcctctggatcacactttaatgctctttcccagttttgaattttatcagataggcagttaagtggtgtttaggtagtttaatggaggagtgatattgatgaaaatggcctttgaaatgatctggcaataagtacaaattggattggaatatgaagaaattatagacaagccacccacttatgagacttttgaaaactttattggattgttttatttatgtattttgcttgagacaaggtcttttgctctgttgcccaggctggagtccagtagcatgatcatagctcactgaggcttcaaactcctgggctcaagcagtcctcctccttgactataggcacacaccaccaccaggcctggctatttttttatttttggtagagatgaggtcttactatttgcccagattggtctcaaaaactcctaggctcaagtgctcttcccgccttggcctcccaaagtgcagggattacaggcaggagccacctcctggcctcctggattattttaaattataagataacaacctatttgaacaagtcaaatggtatagttaatacagttattactctctgcttgcagccccagccagttaatcttccttccctatcagatggtcactgtgaatggttttgatgtaatcatctatagttttcttcatgtttataaaatcacatgaaaatatgagtatgtataaagaggtttttttggttttgctttaattgaattatataaattattttcagtttgtttttttttttttttttacttaataaatgttttgggcagccgtctaggtcattacagatagattttactcatacttttatactaattgcataatatttcataatatgcatataccataacttgttcaaccatctctcttctctctctatctctctctctcatatgttcatttatccttgtattctggagcctgcctccctccctccttgtctttttttttttttttttttttttttttgagacaggctctcactctatatcccaggctggagtacagtggtgtgatcacagctcactgcagcttcaaactcctgggtccaagcaatcctctcatctctgcctcccaagtagctgggactacaggcacatgctcagctaatttttgtatttttttgtacatgtagggttttggggtttcgccatgttgtccaggctgatctggaactcctgagctcaagtgatctgcttgcctcagccttccaaagtgttggcaccatagacgtgagccaccatgcctggcctctttcttcttttccttccccttccctttcctttttgtcttgctctgtcacccaggctagagtgcagtggcaggatctgggcttactgcaccctcaaccttctgaggtcacatgatcctcccacctcagcttcctgagtagctgggaccataaacatgcaccaccatgtccagttaatctttaaattttttatagagacagaatctcaatatgttgcccagactggtcgtaaactcctgggctcaagcaatcttcctgcctccttcccagagtgctgggattataggcgttagccattgcacctgacttttatttctttagtgtatgtttttaatgttttaaacttttttattgaaatatgactaacatatgtgctttctgggttgaaattcttcatttgttgcatttgccaaatttaatgatgtaaatgctgtcctcaggactatttgtaatctactgacagtttgacaagactcacaaaattactgttaaacagttgtctgtcataaaccaatatgaaccagcttcaacacaccaatgcaacatgcttacagaaaggtatacaaatcattactgtacagctcattgtatgtcagtgaagtgaatacaccttagacccttttcaatactctttagtcttttttaaaggtaactaggaccaggtgcagtggctcatgcctacagtgtcaacactttggaaagctgaggcaggaggatcgcttgagcctaggagtttgaggccagactgggcaacataatgagactctgactctacaaataaaaaattaaaaaatgagccaggcatgatagtagtcccacctgtagtcccagctactagggaggctcaggtgggaggatcccttgagtccaggaggtcacggctgcagtggaccatgataatactatggtacttactccagcctggtgacagagtgagacctagtctcagggaaagcaaaaaaggtaaccactgtcctgacttctgacactgtagttgattacttttgagggattgagagactgaaataaaatggtaacagtgaacatagaaacatagaatcctactacacacatcaaacattatgggattattaaatatctaaatttgaaaagctaaccttttataagaatatcaaggaggctattttcatgaacttttgagtagggaaagatttctttagcaaaattcaaaacatgaaggataaaggtataagatttgactgttaaaatttataatctttgatgcagcaaaagatactataaataaatacaaagataaaaccacaacctaggagtatctgtttggagtgcattaactgacagaatattagaatccaggattaaggaagaaaaagaagcaaatcagtaggaaaaaaacagcctaataaaaatatgggcagttcatagaaatgaaaatccactgggtgataaactttagaaaagataatcaatgacagcacttctcaaaataagacatttacgcggccaacaaatatatgaaaaaaagttcaacatcactgatcatcggagaaatgcaaatcaaaaccacaatgagataccatctcatgccagtcagaatggcgattattaaaaaggaaacaatagatgctagcaaggctgtggagaaacagaatgcttttacactgttggtgggaacgtaagttggttcaacagtatgacgattcctcaaggatctagaaccagaagtaccatttgacccaacaatcccattactaggtgtataaccaaaagaatataaatcattctactataaagacacatgcacacgtgtgtttattgcagcactatttacaatagcaaagacatgaaaccaacccaaatgcccatcaatgatagactggataaagaaaatgtggtacatatacaccatggaatactatgcagccataaaaagaaatgagatcatgtccttttcagggacgtggatgaagctggaagccatcatcctcagcaaaataacactggaacagaaaactaagcactgcatgttctcactcataagtggtagtttcacattgagaacacatggacacagagaggggaacaacacacaccagggctttttgggggatgggggttgaggggagggaacttaaaggacaggtcagtaggtatagcaaaccaccatggcacatgtatacctatgtaacaaacctgcacatcctgcacctgtatctcgtggttttttttttttttaaggaaaaaaaaaagacattcaatgttattcattattagggaagtgataaactaagaaaagataaaccatagttctgtaaaattcacccccactagattgaaaaaaaaaatcccattttaaatgtttttaaagacgaatataaccatttatgagggcaattgggcaataatgttgaagatgttcatgtactatgcaataacatcaaattgctaaatgtaccagatatttacaaacgtgaaacaacaagaactctcgcatactgattgcaacagccactttggaaattgtttagcattatatactaaagctgaagtttttctgccataactagcatttcaattcttaggtatatacacaaccaataaacatacatatctcatatgctaggaaatatatacaaaaatgttgtagcattttttatacaggaaagaaaaatgaaaaaatgcctgttaatagtagaatggataaatcgtagcatgtttatacaaggacagtgaatctgaagtacaactacatgggcatggattctcacaagagtaagtttgagtaaaagagggcagacccaaaaagatactacatgatttgttatttaatgttcaaaaatgaaacaaaaactaactttggtgtttggggatacctgtctatagtgttaaaggttgcatgttttctttgtgaaacaaaagcaaggctgggcgcagtggctcacagctgtaattccagcactttgggaggccagggcaggcggattacctgaggtcaggagttcaaggccagcctggccaacatggtgaaaccccatctctactaaaaatacaaaaattagctgggcatggtggcgcatgcctgtaatcccagctacttgggaggctgaggcaggagaattgcttgaggcaggagaattgcttgaggcagggaggttgaggttgcagtgagctgagatcatgccactgcactccagcctggccgacagagtgaggctctgtctcaaaaaaaaaaaaaaaaaaaaaaaggcaagaaagttataaaagtctaggaggcttttgtataactttggagacaaggggttgtggatgtgctttggaaggaaatttaagtggagcttctgagaagctttcagtgttctgtatcttgacctggttaccatacctggtggtatttatggagtttgctttttcataatttattgctgaaccttaaaaaatttttgaaacaaaaacaagcaatagagtgaaaagcttaaaaaccactataggcttttaagttttactgtaatatttagtttcttaaaaactgaaaaagtggccagctgtggtggctcatgccaataatcccagttggggaggtcaagatggaaggatcacttgagcctaggagttggagaccagtctgggcaacatagtgagaccctgtctcaaaaaaaaaaaaagtgtgaaaaagctgggtgtggtggcatgcacctgtactcccagctactccaaaggctgaggcaagaggatcacttgagcccaggagttcaaggatgcagtgagctatgatggcactgttgcattctagcctgggtgacagagcaagaccccgtctctaatatatgtgtatacacacacacacacagattttttttttaagcaaaagatctaaaacaaatatggcaaaatggtaagatttgacacatttggacaatggatacctgagtgtgtgctatgttattttgtactgttggaaaagaaatgaattagctgggcatggtggcgcatgcctatcacgccagctacttgggaggctgaggcacgagaatcacttgaacccaggaggtggaggttgcagtaagccaagattgcaccactgcactccagtctgggtgacagagcgagaccctgtctcaaaaaaaaaagacagagaaaagaaaagaaatggagtctacccaattgctttttcaagatgacatgtccacgggccagtgttgcccaaaagtgaaatgcccaaaattgagctgttagtatgtgtttcagcaatgctggcataagcagatttgtttccttcaagcccctgtttactatgctaatgtttcctgtgaagtcagacaggaaagatctactgtatacaacattttccaaacctctagaccacaggcatttaaaagaattcccttaaggtaattattagcttgaaaaataatacctcccaacagaatcaaagaaactgaagacagtgaataaaaaattgaactagtatctgggagtctgatctcaaccagggacattccctcccacccccacttcaggacatttggcagtgtctggaggccttcttggttattggtatggcatcttagtgggtatggggtgaggatgctgctgagctttctatagtgcacaggagagccctccacaagaaataattatcctaccccaaatgtcagtagtgttgaggtttaaaaacccagcctagattgttgagattgtaagatttaggagaatatgtgttctcattgtttagagcagtttttaagccatttttctctttccatgtcattcacattgattgcacacctccatttaaaacctcttttgtaactttgcagtgattaggtgaatcctagagtataaaattattttgtttgttaattttttcttgaagtcttaaagggtaggcctttaagaaagattcttttagatttatagaggaaattgatataatggattcagctttccctcgttgctctgtagtactgtatacacacacatacagatacatatgtacatatccatccatatatgcagctgcctgtgtccaccaagctctactaaggcataccatacaaggcttgagggaatcataagacatggtcaactccacctctggagtattttgctgcttctgctagttcaactggaaatgactgaagaggcctgtgagactcccttcatgaataataaagcatttaactagaattcagcatttctttttggaggaggacatctgaattaagtggcaggtgaggaagagtggacaagagaaatgttgtcctgtatctaaatctgtacttaagtacaattttaaattggattattgaaactttaaattgctgtgcttttgtcttaattataattgaaatgagaatcctcatctcagaacccctctagaatataaactccaaggaaagggactttttctgttttgttcactgctgaattcccagtgcttagaatgattcttggcaggtaatagttgtgagtgagtaggtaaatgcctgaatgaaagaataaccaacttgaatgagtttcttttatgccctgagactgtagttttgttactttttgtctgtgctgtgggagacatacatacctcagctacaaagaatggcactaaaggcagatttttaagcattctgtatactgttatgccagatacagagcttgtagtattgccactttaagtgtttaaaagcaaaacatgaggagaatgacaggactgagaataggaagagacaccgagagaaaaagagaggcagttaaatcccataaaaaataaagcccggaattgcagacatgacaagtcagccttgggcaacagcgagtgaccggtcaactggaggaggagggatttgtaactgtcctgatggaagatttttataatgtgttgaagaaaaaatgatcagagatgacttatactttcataactgaccactcccttttgaatcttgtgcatatcctttaacactatacctcttcaggtatatctaacagagatccattttgatagatgtgttcatagtatgcagagtattatgtacagttttggcaggttaaattgcctaaggtcacgatataaccactgatagaaaatagtatgtcaccatggacctgagagttatgttggtttattaaacaatttttttttaattaccatattgctgtttacttcactttttttttttttttttttttttgagacgtagtcttgctctttcacccaggctagagtgcagtggcacaatctcggctcactgcaagcttcgcctcccgggttcaagccattctcctgcctcagcctcccgaatagctgggactacaggcgcccgccaccacgcccagctaattttttgtatttttagtagagactgggtttcaccatgttagccaagatggtctcaatctcctgacctcgtgatccacccgcctcagcttcccaaagtgctgggattacaggcgtgagccactgcacccggcctatttacttcacatttaagagcaaactgtccttggccaggagtagtgacacatgcctataatcccagctactcaggagacaggtactcaggagacagatgggaggatcacttgagccccgaagtttgagactagccttggcaacatagggagacactgtctccaaaaaaaaaaaaaaaaaaaaaaaattttaaagtaaactatcctctagaaaccagagttttagagttagcacagaggtgccatttgcttacattatcctattcattacaaatactttacttcagactagcacatgatttgggggcaaaactactgctgggccatgggttgccattaacatctttatgttctgagacagcattgaaaatcctgaacatgccaagccaaggccaggacttaccattccattttcatttctgtttgattaccataattactacactgctgacaacccttgatgattctctagaatttgatccttttggggataagcatgtccaccctcaatactaacaaatatgtcagcagtataggccctgttgcttgaagaaaattactacctgatgctgacaacattcatatctaagattgctgagtgacctgtatgtggatgggtctctttacactaatgccacattgttagtttactactgtgtaaaaataaaaagctaggtgctttctagtgaattcagcttatcaagcagccttcctaaaacattctcaccgactcccttgctccctgagaaaaagaaacccgtcccgaacaacccatttaaacacacacattttagtgctgatcatggactgttaagtgaaaattgcagttgtctaaatagatccttttcccactgtcacatacctttcattcttgctattatccatgatcatatttgcatgcatctgccttgtccactgttgtgtctctgaaaaatcatagtttgaagccctgactcttactataattacattaggaggtgggtggggggcagtaactaggtttagttgaggtcatgagggtggagcccacacaatgggattagtgcccttggaagaggaaacacctgagctgtttctctccctgtcatgtaaggatacagtgagaagtcagccatttacgagccaggaagagggtcctcaccaagaacttaatctgccagtacattgattttggacttcgcagctttcagtactatgagaaataaacttccattgtttaagccacccagtctatggtattttgttatagcagcccaagcagattaaggtatccactcttcatgttctgttccaactaaccaatctcagtgggtctcttgaccacccagtgtccagcagacaacaagtgctcacttacagccctgtcaaatttaccatcccctaaggacaaaaaaaaaaaaaaaaaaaaaaagaaaatcaccatgaatcactattctcagaggatatgttctcactggcccctttccatatttccacagccctgtcaaccatccccagagggtattaagatcatattccaaaacaagtcttcaaggagctgtatagctaggtattcattcattcagagatacatttttgtaaatctgtagtcattctgctagttattcagttttaatacttccatgtgaatatatctgaaaagtttatgcatgattacatgttctttatgccccaattcatgtgaaattcctcttgaccattattttgggatagcagacttttgtttctcttgcattttgtgattttctctttattgcttagtgagctaactttgctttatcctttctttgatagctatgttattacaatatacgttactcttaatgtttaatcataggcctgtcaaatgaagtgtttaatatagccatactagttgtttattgggcccttactgtgtgtcagccactatttgcttttccttagatacctcatttgatcctcccaataacacctcctaagagataggtataatacctcaccccatttttgaaatagaggtttggggaaactgagtgacttggccaaagtcacatggcagagctgggattgtgactatgtccagagctcccttttcaccagctattttatcatgttccttaatctacagtcattttggaatatctcattctgcaggtgtaggggctgaggttcagtgaggtaacttgctcaaatttacatagtagattaaagagctgggattcagtttctgattttgtgactcatattccagcactctttcgatttcagttacagcttatttatctgtggcttattaaagtgcttccatgctgaatgctcaagctgccctctcagatggacatagaggctgtacctcccttgttttagatgacaaaactgaaacttggattaaaagaattgcctttgtttatatagcaagtaagcaaaacttttgatacttaacccagctcttctaaaatagtcttccctgcacttctcaccatatggcagtggcttagattttcatattgtttgttgtcctcatttctctcttttctacacagtaaatctgtaatgtaggaaacttctctttagagatgatagattgtgggccggactattattttcttgtcagtcagttatacacttaatgtcaatacagatgatggaggtaaatatgccaagatgctggctaggattttgtggctggtttaacttatgttcctataaagcagcaaattggatataactgctgatgtttagaacctttagttctaaaatctaatgtcatgttggtgctcttgtatgccaacctgcttttgaatatacttcttggttctcttttgtatttcttagtccattattgtgtattctgggtcttatataagagaaggtagaatcaacttttggcttttgctttggaaaactcttgctttcatgtagcatttcttttcttgaaggctgacttgtgtgactttagaataggcctgactgtgaaattatctatagttgcttgcatttatgtagcctaaatttggagttaaggatacagtagccttttctctggttgtctaaaaaattatctgaaaatgttcccctcttcctaagataatgtctcctgctgaaaggaaatatgcagtgtaacacatggttgattattactggatctgttaaatgatctttcatacatcgtagggaatacattggagagtgtgccatcagttctagtacaaatattctagcatcatcatcgtcagttctcaggaagtttctctagccatccagccttgatcaacagctgaccaagtgcattctggttgataacattaattattttgtgagtatggatgcagtgtacccagttttcacaaagatcttctgttatacctagggcaaagaccatacatacatttcagaactttgggagccactttgtcatcccagaaaaactgttgtatcatattatgaaatagctgttcaaaatggtgctcagagggatgtcatctgtaaattagaatattttagtagaatccctgctgcagtctactgtctttatattctaaatatgttcataagaatgtctctgtgtttggttacaagtaaccttgagctattacaactattagaaaacaattattattggatttggatggaaaccttgtaaggatcttgcttccaaacttttggagaactagtatattctcatggcacataagcaataagcagtaaacatactatatttatagtcaaggtaagtgctaacattatgacattccccaatgaaaagatatctcaaaaatcccccagtatcccaacttctgcataaatacaataaggatctcacctacaacagttttgcgataaccagcaaattctcccttgtcttatgtcatttttgtgtgttctattaaaccaaaatacttattacaacggtacttcttaaaaaaagaagtaataactctacacagttttttttttttttaaataaggtctagataagttcagagttatagttgcaatgatatgacaagggtttccatgttagctagtagcatggctaaaaaagagtacatttatatgagaggaatgtgtgtcttttctaaataaaatttaagacatattactgttgaatcatgaaatgcctgaagctatattgtttgcctcttatagaatgcttacctgtggttcagtcagcattatttcatacaataaagcaaacagatatttttaatgtctttaagtaatcttgttgattttttttattttcctgtctggatgtagctgaaagtacccatggcagacaagcctggtaacacagtgaatttccggaagctgctactgaaccgttgccagaaggagtttgaaaaagataaagcagatgatgatgtctttgagaagaagcagaaagaacttgaggctgccagtgctgtaagtattttcatagaaagacagtgcttgtacactttgagcactgtaaagtagaaatttcaggaagctagatacagcatctccctgctaccttaagagggacctatggcctttttttttccatgtagaaacaacatattaatgtttaggggaatgctttgttccttttagtgcctaatataggggacagctaaattttccatgccagccattcaatctaagcctgagtcaggtcactgagttccaaaaatctgaaatggatgggtatagttcagttttctgagcagtagattctacacttgctatcagattctcacggggattctgaccccatgaatctcagtgtttattgtgcagtacaactttcatcatcaagatgctattattcctccttacacaacagccagaggagaggacaaggcttcatgatgaactggaagaagccaaggacaaagcccggcggagatccattggcaacatcaagtttattggagaactctttaaactcaaaatgctgactgaagccatcatgcatgactgtgtggtgaagctgctaaagaaccatgatgaagaatccctggagtgcctgtgtcgcctgctcaccaccattggcaaagacttggactttgaaaaagcaaaggtaaaaatccaaaagctcagaaaccttcgcaaaggctccttgtcagttgcaaaagaacttagactgtcaacagaatagttctatcttttcccaaaggtctgggctgtttatttttcttcttttgcccgtctcattgtcagtgttcaaccatcgtgctccttacatttccatcagagtcagagatgaggagggtcccaaattgtgtaaaagccagtttgtagattcttcagattatttgtcccatattcttttttcttcttctgtaaccatttcccaatttgggaacagaaatatgcaaagaaaaactatggcctaagggtagtgcagaaatgaagacccagtagtgcttctagagtttatactctaattgatgacacagccatctaaccataatataagaaatcattaaaaatactgtaataatgtatgctatttaaggggtatagaaattagaaatgcttcaaagaaataatgtcagaaacgctccataacatctgattcagctaggattatgcttagctgtgacagaaaacccagtggtttatacaagattgaggtttacttcttatttatgtaaacaaagctctgaggtaagtcctttcagcttaacattctgtgactcctaaagtttaacccttgtcctaattattctcaccagagaaggtaggaaaaggggcaaaagacacagccacctcctctctctctcttttttttttttaagtaacagggtcagccgggcacggtggctcatgcttgtaatcccagcactttgggaggctgaggcgggcagatcacctgaggtcaggagttcgtgaccagcctgaccaacatggagaaatcccgtctctactaaaaatacagaattagccaggcatggtggcgcatgcctgtaatcccagctacttgggaggctgaggcaggagaattgcttgaacccgggaggcagaggttgcagtgagccaagattgcgccatcgcactccaggctgggcaacaagagtgaaactccatctgaaaaaaaaaaaaaaaggaaaaaaaaaaaaaaggtaacagggtcttgccctgtcacccaattttttttttttttttttttttttactttttgtagagatgatgggtctcacttagttgcctaggctggtcttaaactcctggcttcaagcagtccttttgccttggcctccctaattgctaggattacaggtatcagtcactatgcctggcccctctggtctctttaggaaggccctaggaagctatagcataacatttccatttatattattgcctatcattaatcacgtgaccaaagccagctgccaggagcctagaaaaatgtagtctttattttaggtggtcatatgaacaactaaaaattctaccatatggccgggcacagtggctcacacctataatcctaatactttgggaggctgaggcagaaggattgtttgagctcagcagtttgagaccagcctgggtaacatagtgagatttcctatgtccaaaaaatcatacacacagaaaaatttagctgggtgtagtggcatatgcctgtctgtggtcccagctacttgggaagctgaggcaggaggatcacttaagcccaggagattgaggctgcaatgaggcataattgagccattgcactcccaactgggtgacagaacaagaccctgtctcaaaaaaatacaaataaaaattctaccacattatattttggctataaattgatattcctagaccatttagaaaactacatgggctggacgcagtggctaatgcctgaaattccagcacgttgagaggccaaggctggaggattgcttgagcccaggagttcaagaccagcctgagcaacataatgagaccctgtctctacaaaaaattaaaagattagccaggcacggtggcacgtgcctgtagtcccagctactcgagaggctgaggtgggatcggttgagcctgagaggttgaagctgcagtgagccgtgattgtgctactgcactccagcctgggcaacggagtgaaaccccatctctaaaaaaataaatagataactacataaataaataactgtaaattggtaaaattacgtttaagtttctcagacaggagtactaatgattttgtctcttgcagccacgtatggaccagtactttaatcagatggagaaaattgtgaaagaaagaaaaacctcatctaggattcggttcatgcttcaagatgttatagacctaaggctggtgagtgggaaaaaaaataataataagcctgctggtccagtctctttaaaggaattgggttggggaaggatgtcctgttgtttacatgtgtaaagatagtgcttttgcttcaggactcagaatttggattggcaaactttccgtgggagagttctgagaagggacaaaaggcctattgccagttacgtgcttcttctccttattctgattatcaaaccatattgcaattttgtttgcgctttgtttttttttttgagatagagtctcactctgtcgcccaggctggagtgcagtggctcaatctcggctcactgcagcctccgcctcccaggttcagatgattcttctgcctcagcctccggaatagctgggattacaggcacatgcccccacacctgggcaatttttgtatttttagtagagacaggatttcacgctgttggccaggctggtctggaactcctgacctcaaatgatctgcccacctcagcctcccaaagtgctgggattacaggcgtgagccaccacgcccagccacttgcaatttgtaatcagccattctgaattcaaactccattcaaatgtaaattcaattaaatttagtctttgtgagctaaataatcagcaagtctcatctccacagtaaatacctttaactctctgagccttacatttttaatctctaaaatgaggatgttgcctaccttgcagatttgttgaagagtcaatggaataattacgtaaggtgcccagctcagatattggtgttttcttctctttcgtttttcctgtgaccctcctattctgctgctgggttttttttgtttttttgtttttttgtttttctcatttctcttaccgggtgcagtttttgttactactacttttctctgttttaagtttaactcctacagggagttactcttttgtaagtttcactcctacagggaatatactacatcaagccctacactagagaaagtgaacaaagccctacctcttatttctcctccacccaggccagatagcattgatgatgattctttatcttgctaagactagatgtggttgtcttcacccatgttatcaaccacttatatcagatgttgggactgttgctagaaagagaagggagaagtataaagtgacaacttattttgtccttaatacaggggataaccaaagggcagagtggtatggacctttgtgtagaatatcagaaccatgatattggagaaataaaagcatgagtcatccttgacttagaacccctatggaatgtgatatgatctgagtagtaatcccacagattaaggcaaggccaaggaatcctcatcatttttatttttctctcctcctttcaaatgtacaaaatactgatacagataaaatccatttagtccacagagaaatatatgccatgcttaaaaatataataataaatttgggccagtctttcaccctgttctttgtatccattggctattggaatatgtagtatacaattggccagttttgactgagaagattttaatccttcagctctaatcctaaactgctcatagtgtcatctataagatacatgagaaactgccataatacagcttttgtaggtattttgtacttttccagtagtaaaaattgctaatttttaaattttaaaaaatgttcagtttatctggcagataaccttattttctgcttttatagtgcaattgggtatctcgaagagcagatcaagggcctaaaactatcgaacagattcacaaagaggctaaaatagaagaacaagaagagcaaaggaaggtccagcaactcatgaccaaagagaagagaagaccaggtgaggccggaatccaccagggtttagagaacttggaagtttcaggaatacatattaagaattatgtatttaggtataaaatgagatcagaaagaacagcccaaagaatagagtggtgattgttaggtgaagcagtttcacctgaagagtaaagttactgagtaaaagtagagaatgcaggaacaaagcatgatttctttcactacttaaaagccagtaagcaataagactttattgagcatcttctatatactcagaattggtgagactagaaaaggaagtggaaaatgtagttacttccctctcaaagtgtacagtttatctggtaaggtaaaacttttgacaagcaaaagaggaacatttgttaagcaaatggaagatagtatatcaattatgaaatgtgttctccattaactgttaaaatttagagaaaaagaagagagacagaaagctgaaagaaaactttatttaagaaaggggcactttgtagcaggccggacgcagtggctcatgcctgtaatcccagcacttcgggaggctgaggtgggtggatcaattgaggtcaggagtttgagaccagcctgaccaacatgatgaaaccccgtctctactaaaaaatttgctggacatagtgatgtgtgcctgtagtcccagctattcaggaggttgaggcagaagaatcacttgaacctgggaggtggaggttgcggtgagccgcgatcgcgccactgcactccagcctggggaacagagtgagactacatctcaaaacaaaacaaaacaaaaatagagacatgcaaaaaaagtgaaagatgaagtagaaggcattttaaacctgagacgatagtccatttactaagtttaggaacgttggaaaagaaaacctttttcagagggaaatgataattttctggctgatagtaaatactcagtaaccattagttattgtcacagacacagtagagctcatagtgaagttgttaggagagatgaattctgcatggaagaaagtttacttttaagtttcttgagataccacacttaccttcctcgctctagtacctagtgcagtgccttttgggtaataacttttatttattattgaaccagattgagagggaaaaggagaagataccaaagcctaattcatggaggatattcacatatgactaaaggaagaaaagaactcttggaaaagtgccagacaagtggagagaaaggactaagatacaagtgtcatagagacaaggaagaagcaagtctgtttatgatcagtaatatcagatagcacggagaaaatcaagacgttatgttaggaccagaaaagcttttggatagacagttcggtgatctttcaatttattaattcattcagcaagtatttttttttgagatgagtctcgctctgtcgcccaggctggagtgcagtagcgcgatctcggctcactgcaacctccgcctcccgggttcaagcagttctctgcctcagcctcccgagtggctgggattacaggcgcccaccaccacgcctggctaatttttttgtatttttagtagagacagggtttcaccatcttggccaggctggtgttgaactcctgaccttgtgatccacctgcctcggcctcccaaagtgctgggattacaggcgtgagccaccgcacacggccctcattcagcaagtatttattgtctgtcacttaacaaggcactcaaagtcccttccatcatgcggcttacatcttatggtagaggggagagaggagacaataaataataaatacttaaataaaatatatcatttgtcaaataaatttgtagaaaaacaaagaagggagaagggactagggagtgcaaatcttggtgagtagggtgcagttttaaacaggaaaactggggaaactataaaagttggtattgtttgagcaaagacctgaagcaagtgagggtgttaaatcatgtggaaatctggggaaagagacttttaggcaaagggagtagtaagtacaaagaccctgaagcagcattttcaaggaatagcaagggggccagtgcagctgaacctaagaagggcctgacggggagagtggtagaagatggggacttagaggcagcaggagccagattatttagaggccatttgtaaggaatcttctctttttctctgaatgagacagaaaggtatcagaagtgttttgaacaaaaaagtgacgaattttgtactttactaggatcacactggctgccatgatgagcacagctgaaggtagaagcaggaaggccaaaacacgtctctgcagtaatctaggaaaggggtgttggtggcttaaacaaaactgctaatgttggtagtagattctgaatgtattgtataggtttaactggcaaggtttactgacaaaaattggatgtgaagtgtgaaagaggagtcaaggttttccacctgtgcagctgaaatgttggagaagcagatttgggaaataaagcatacttctgtcatttgatcccattaaatacaatatactttagaataaataatttccatctgacttctccgaaagtgttctagtcattaattctgtgaatactggatttagccctgccttctccagcaccaggtattcatttgtgtcagttgtttgtttctaggtcagtaatgtttcatgggtgatccaaaataagcagtgcttctgctgatacagggtgcttctgctgatacagggtgcttctgcttatattttcctgccatgggattaaagatattgtcatcaatgctttaacatcttctgttgtctttctccttggttttgatgaaaatattgctcactctttcaatgtaaaactgacttgagacagatgagagactcccactctgttctccctgcaggtgtccagagagtggacgaaggtgggtggaacactgtacaaggggccaagaacagtcgggtactggacccctcaaaattcctaaaaatcactaaggtgagtctgacatttaaagtacaatttacgctctcctttgatgcctttgatattaaaacacacacacacacacacaatttacaatagttgcaaaacgtgtctcaaaagtacttattaaagtaaaacagcaatattgcaaatccatggggtggttattttttaatgcatttttcttcaagttactattgatcaatgtattctacaaactcatttctacattttctttttttttttttttttgagatggagtctcactctgtcgcccaggctggagtgcagtggcacgatcttggctcactgcaagctccacctcccgagttcacaacattctcatgcctcagcctcccaagtagctgggactacaggtgcccgtcaccacacccggctaattttttgtattttttagtagagacggggtttcaccgtgttagccaggatggtctcgatctcctgaccttgtgatccacccacctcggcctcccaaagtgctgggattacaggcgtgagccaccgcgcccggcctcatttctacttctataaggatttactaaagaggaaaagactaggttacttcttagacataagatgcttaatatacaagaggtaataacaaagatattttagaagcctaagtcaattgcaggcttttacacaatgtatccgtagctctggggaaaaaagcaatcacctgtttaaacctaaccatgaaagatttgccttatccaaggcgtaaaggaaaccacagagggcctactagaaatcattctgtaataaggatttaagagactctgtctgctttcctctctttttgagagtctgtgggcagtaagaggaaaaaactttctgtagcaggtattttcagcagtaaaagttgatcattgtaaggaggatgaagaactttggagaatgtagagaaagcagaattaaatatgataagagtggaaacttctaaagtccagtgggttttccaaatcatttgcaagtctagtttgatccttatacttcccatagttctgaaaatcggcaccctgctagcaaaatactgaagacaatcaaaactaatgtgaaaatactacatgaaagaagataactgacaagaagtattaagaaaagtctttaagaaaattggaataaaatgggctatgtcatttgcatcttcacagttttgtcaaagctttgcttcatgatagaaaattctccttctgaatctctcttaataatgtaattagctaggatccttttctccaagattctggtactttcttctagttgtttatatctcagagtaggaattccattgctgaatacaatttgagtcttacccatctccatttccatctagagacagttttaaccaaaagtttatgtttaaagaagtcctccagcattttgaaaaatgtgtcggtatttaataacaacatttgtatttttaaatattatgctttccgtgcttggatactataaaaacagtgctggtatcaaacctccaacattactaccttaatatttttaagtatgtaaattgctaataaactttgtgtattcagatagttatactggaggtactatacatgggtatcctagaacaaaaccgttatacatatttattgttaattgggagtggtttgtgtgaaagcatattacatagcatagcaacatatatattatgagctgtcagaccatagaaataccttttttacaaagcgctacattacagcttttatgttatatgtattttataataatatgcattacagcgtaattttatttcacttgtagtaaagttgtgcttggaagattaaacatgagatatcaggcaccttaacttcctgtgctccctgcctaacattccaatctctttcttcttattctttattgaatactcacatcccactgcctgtctctagccaacatgaaatttttatgtctgttgatctgttttctgacagtcatgtaaagacactaatgaattaattttgtagtatttgtattttttatttttaaaattaatgggtattgtacaagaagaatgattagaaactgcttattacagttagcaaattcataaaccatcttaaacaggaggacctggatgcattctctagaccaaacagttttttgtggaaactggagtccagggaagtgcttcaggggccacatggatcccagtttaatgagaacagctccaatttctgtttctattaaattggcattccaaacaaatttttgttgctaaaattggttctacttcactgaagaagaaaaaaataaaagaaaaactattcttctagaatatttcctataattgacttgtggtcccttatgttacagcctacaattgatgaaaaaattcagctggtacctaaagcacagctaggcagctggggaaaaggcagcagtggtggagcaaaggcaagtgagactggtaagtgtgtgtgtcccttctcaaacctggctgtggcttgttagcatttgccttacagcgcattcccatagtcatcgaatgatggtttttgggaaagatgtgtagactaatcatgcctaaaattttattggtagccctttcctttcaacatagatcctttctcaggatccttaaataattttaagtatttttttaatttcaattcattcatttagactatttaattaagacctttatttatttatttatttatttatttatttattatatttttgagatgggatcccgctctgtcacccaggctggagtgtagtggcatgatcacaactcaccacagcctcaaccacctaggttcaagcaatcttcctgcctcagtctcctgagtagctgggactacaggtgcacgccatcacacctggctgatttttttttttttttttaattttttgtagagatggagtctcactgtgttgcctaggctagtcttgcactcgtgggctgcagtgatcctcccaccttggcctcctgcgtgctgggattacagttatgagccacactcagccactaagaccttaattttttaggttccctttttgttgttgttcacaaatttaatatagctagagaaattactgggaccctaaattaaaagggaaactcattatgctgataaaagaatcttaatatgcagagcatttactataattttagggagctgtaaaagaataaagaaacattgttcaaaatctttttcgaaaatcagattttgagagatttgacctcaggaccaaagatgtttggatctcacaaacacatcttactagcttgaggaagcccaatggaaagaaaaaaaatttaatgttaacctacttcctatatgtcccttctactaagtaatttcaacctttttttctttaaattttaaaaaatgtcattattcagtaaaacccacatgcatatttgtgcacaaatgagattggagcatttgtgctggttagctttgttaaagttttgttctgttttcgcttgccttcctcctcctatatgccactcccacccctgtttactatgtttttaaaggaaccaatggttgaaataaataaagacttctaaactctattatgtgcaaattccctctaacactttgcttctcagaatatggtagagggaccaggagatgggcgtcacctaagcttgttaggaatgcctggtctcaggccttacctagggatgcagatgactgattatttgcattttagtcatgtgatttgtatttttttctaaatcctcgacatgtgtagatgccttacggtcaagtgcttccagtttaaacagattctctgccctgcaacctccagcaccctcagggtccacgccatccacgcctgtagagtttgattcccgaaggaccttaactaggtgagaaccctgctttttatgtctactcaaggctggcccgcttgccagtatgtgtggcaagataagaacaagggttttgatagtaatccttatggatgcattccttttattcctaaagttgatttctttaatcttcacacactataatttctaagataggaacataattgggtggtgaatttgggatgggatgggagggaagggattcttaagaaagctaggcccacccaaacagccctggaggcatgtctaggggctccgcaagctaatcctccagatgttctagaagcacctagcattctcaaccatgggaattaaagaacatgacaatccacccatacatttctctgtcacactcttcatgttatatttgaggttgtccttcagtttttgctagtctccatatttcactatctttctgcttttgcttttctaggattgatacagtcaagtatcctgttggctggtttacataaaatgaatgggcaccctgtagtgcagtcacaaaaaataacattttttacataagcactttcagaattgaagtttctttaagctctaaaactttttttttttaattattattttttagagatggcatcttgctatgttgcccaggctggcattgaactcctggtctcaagcgatgctcccatcaggctttttattattattattgtaataagtttgattaggtagactttgtaaactgtgttcttattcccttgacttctattgaaacaaagtatagttagcacaaggcagcttttcatgatgattcaggttgtcattgagtatcacttgtggcgctttgccctgtcataaatgtcccctaatggttctgcttcctaagcacttgtgtatgttctttcacaatagttagaccattttcctgcccgagtctctccttttcccttttaatttgctgcttctggtccgccacgggccaacgaactgtttgctcagctggttagaattgtctaaaagaagacgaatcaggaaatatggagagtctctcttaaaaggaataaaatatatagcgttggctaatccaagacagcttcttcttgattctcaaatattttccatatgtttaaagattctaaataaaaaggtatcattgcataatttctgagatagtgataccatgttcttataatatttgtttccctttcatttatgtaactcatactttatcattgtcttctttattcctgaaagattttttaaaactaaaaaaagaaattgccaaaattaaggccgggcacagtggctcacgcctgtaatcccagcagtttgggaggccgaggtgggcagatcacctgagatcgggagttcgagaccagcctgaccaacatggagaaaccctgtctgtaatcccagctactcaggaggttgaggcaagagaatcacttgaacccgtaggcggaggttgcagtgagccaagatcacgccactgcactccagcctgggcaacagagggagaccctgtctcaaaatacataagtaaataaataaataaataagttcagctccaaattggggaaatgtgggctccacagaaagaagtggttataattactaggggaacagggcccttttactgagagaggaacacatacaccctcatcaacacagaggcaccgacacagaaaggaagaaacagagtcttggagaaagagacagagtcagggtacccggagtcagggacagagcacacagacccaggggacagacagaggtgcatagacgatagattcccattcgctcagatggagccagagcaatgcccgggcacagagagacccagcagctgcagaacagaggagacgtaggatagaatggtggctagacaggcgagggcaggagaggaggagcaagcaggggccttcatggggatctgtctgtccgtacagcgagaactaccagcctgctcatccgatcatcgcnnnnnnnnnnnnnnnnnnnngctctctgctacttcctcctcgcagtttcaggccagtctcatgcctcagcctcccaagtagctgggattacaggcacccgccacctaacccggctaatttttgtatttttagtagaaacacagtttcaccatgttggccaggctggtcttgaactcctgacctcaagtaatctgccctgctcggcctcccaaagcgctgggattacaggtgtgagccaccatgcctggccaccactgacatgttaaagtgttaaatagtatcccttcagagaaaaaagttaaaacatcttaataaatattccctttaaagcactcttttacttgtttgttgaataaactttgaaatataattggtgcctcacacatctaatgttatctgtgaaaaattctgtatactttcagaaagtcttagtgttattttataatttgaatatgtgggggacatgggcttgtctttcctttgaaaagtgttgttttgtcttttaagtcgtggaagtatgggcagggagaagaatgacaagccccttccatctgcaacagctcggccaaatactttcatgaggggtggcagcagtaaagacctgctagacaatcagtctcaagaagagcagcggagagagatgctggagaccgtgaagcagctcacaggaggtgtggatgtggagaggaacagcactgaggctgagcgaaataaaacaagggagtcaggtgagagacttggcttaaacagatgcagatttgggttttaaatttggaaggaaaaataaaaaagagactgtgcctgagtagattttagaattaacacataatagcaacacataccagcatctgaagagttaaagggtacttcatagttttataacagttctcattccctaggtatgccttagctgaacagtttgtaaattttctcctttctctattaaatgttatggtgaggaggtcctcctgctgtattttaagcaatctgaatttcttacaagtccctgtaacatcccacacttgacgttgctgttagattgtgtatgctgtgtagagctcctcaaatgtgtgaaaattctcattgagccactgcaagacaaaccaaagagaaggtattaggttatctttagctgacttcatcttccgtggtaacctgttgtttttgtatgcatttagcatgtatatacttagaggacttgctcggataatgctctaaaaattgcttcatgtatttaacctgtgtttcagtttccttatctgttaaatggggataagttgtacctaccttttcaggatattatgaaaattaaataagaagttaatacacgtaaacacttagaacattacgtgataaatacaaggttttcaaaaagtattaaatgttgtgatgacgaatatagcaatggaaaacagtttaaattgaagattattttcagcctcttttaaatattagtcatgaagtaatagcagttttagttttttagtatttatatagctttctaatttgtttcactatataaattgtatctcttaactgtagtccctaaatggatctcagagacaaattgaagtgtcttctcccaattggtgtaactttagataatacagctttagggacatatggcttttttaaaatctgtgctagatacttttgaaatataacaggataggacataaaatatcttgggtgtaatgaataatgtagcacagctgccctatgtgtttttattgtctggttcatttgtacacttaccagatgcacagtgaatgtgaggcccttgatccctgttctcggccttcagtctgctgagtcagaaagaccttttttagtaattccacgaaagacacaaactgagaaaggtgctatgaaggaaggaatttagttctaagagaatacttagaactatctggtaccaaggagctatgtagaataggggcaaggggaggtttccttcatccgaaggaccagtaggaatgaaacaggttcgtaggcaaggatgggtgtgaaacagagggaaagagcactccagacaggattactgtgagcagagctgtagtaggaatagccacggtttgttcaagcagctgcccaagatcagtgtggctcaagcttagtggcgagcagggccctgacctgtgcaggattgtgaagacctcatgtactcttcatctttgaagcaatggggagcaatcataatacagaaaggaacaaaaaagctttaattaggaaagtttatcatgttcctaaatcttgttcattgttattgtagattataaagttacttagtgcgaatctattctaaaacaaaaggtttctgtattctgtttttatctattaaatgtcttgtagctattaaaataatgtaatagcacataatattgtcaaccataatctcactattttaatagtaatttttattatttttactttttttggggggcctcactaatagcaaaaccagaaatttcagcaatgtcagctcatgacaaggctgcattatcagaagaggaactggagaggaagtcgaaatctatcattgatgaatttctacacattaatgattttaaggtaaatgagattaaaaaaaaaacacacacacagtaagtcctttgatagtatataataacttggttctggtctaaatcaggtgtcattgtgaactgataagacttaggttgagtaatacaagtcctacacaattcagtttgcttaacgctgatgcatttctgccaagtactctcttttaatttgatactataatttacaacatagagtggtgggcagagagtatgagtaccaatccatccccactaagggaaaaccaaattgatttctatattaaggaacaaaaacaacacattatcattatgaagcatttctggcaccctgtatatagctgtcatggtctttttttttttttttttttttttttttttgagacagagtcttgctgtgttgcccaggctggagtgcagtggcacgatctcggctcactgcaacctccgcctcccaagttcaagcaattctcctacctcatcctcctaagtagctgggactacaggtgcccgtcaccatgctgagctaatttttgtatttttagtagaggcggggtttcaccattttggccaggctggtcttgaactcctgacctcaaatgatcacccacctcggactcccaaagtgctgagattacaggcgtgagccaccacacctggcctgtcatggtctttataatcattctgttatcattctcatattaatcttgaaatatggccagcattactttttctttatttcataaaactgaggcataaagaaacaagcaatgtgccaggtcagacagcctaagccagagatttcaagacaaggccttgaatttgccctttaacccttaccttctctttaatcttcattttgagatagtagtgaataagacatttctacctgaccttgtgaaccctatagtctagtggcagagacaaaccataaacaaataactccactagcagttacttaactgtagttatgataaatgctagtagacctataggtcttaggagaaatccattaatgggatctgattaagtgatgtgaggtcaggaaaggctaatctgttaaaacagtcttatctgttaaagtatttgtcagatatattaactacttttgctgctttggcactatattattaaaaattctttcaagattatttgttttcttggccgggtgcagtgactcatgcctgtaatcccagcaccttgggagctgaggcaggaggatcacttaagctcaagagtttgagaccagcctgggcaacatgataaagccccatctctacaaaaaatacaaaaattagccaggtgtggtggcacgcatctgtagtcccagctactcaggaggctgagatgggaggatcacttgaagcccgggaggcagaggttgcagtgagccgagatcatccactgcattccatcctgggtgacagagtgagactgtctcaaacaaacaaaaaaaaagaaaatattacttgttttcttaacagtgtaatcatcatctgctttccacatataaaaatcaccttggttatctatagttcaatcttctaaagccttcaagcctctgaaattcttcaaaattcagaagaagtagaaggaagtttttgatgatgagtgaggtggaggtgagtgctttgcagaaactgttggaaatgtaccaaagtaaatgaacattaacgggaaatagccaaagaataaacctgatgtactgtgattcatcagttagcctcctggaaaattaggggtattcttataaattggcagcatagcctttttcttgcatggaagtagggaaatgtgaacgaattgcaaaaaaattagaatggccaagaaagatgaaacgccaagacagtaaggaagaaaacagtggagattggcttcagatgtaatttgaaggatgtacaaagtcaatgaataaccctttaaaaggggaaaaatatgatcctgtgatgaactggaggtatagggagtaaaagaccttagtaacacctaaagagtacaataggaggactctttggagaatcatgagccctgggccaggcttgcaatacagaaggggcagaatcgttgtatctttagaatttcattgtgcagtgtacaaagcaactgtgcctgcaatatggttaaaacaggtattaacattgggcatttactgaggacttactctgcgttgggtgctgttgtacatattcggcatgtattagtttgtattgtcctcgtaacattctcctgaagttgatgttattatcatacccatttttcagataaggaaactgaggtgcaaagatgtaaatcaacttgttcaaaatcttaactgctaataagtgccagattgaggattcaaagctaagtttctagcttcagaggagaaaatgctttatctcattacctttggggtattagtgtgtcaggctaaagacttaaagagctgatcttaaaaatattttttccaaatatcttcctattaggtgctattgtttttaacagtgattcaaattaatatttattgagggtttattttgtgcctggcactgtgccaagttcttatacctatattttatatacattcctcacggtaactctaaaaagttaagcccaagagattaagttaaactcctaaactctaaagtagtaagtggcagagccagggttcaaatgcacctctgtctgaccccaccgtgcatgttttagcctctatgctatttatttattgaatacctaagtgtgctagccacattttaggggttatgactgggtataccatatttgtagtgaacaacaaaatctgcttccatggagcttacattccagtggggagatacagacaagtctggccctaaagataggtagtaaattaataaataaacagtagctaccaaaaaaatgttttcagtgccaaaaactaaaattatgtgatttgatggagtcagggaagacaggaagtatcatttcaactaaaagctcaaagacaaaaagaagcaaaccataagaaaaccagatggaagggcgaggttatgaactgctatgacactgtgagtataatgatatagctggaagtattacccttgaaaaccagcgcaagacaagaatgtcctctctcaccactcctattcaacatagtactggccagggtaatcaggctagagaaagaaataaagcatattcagataggaagagaggaagtcaaactctccctgtttgcagatgacatgaacctgtatctagaaaaccccatcatctcagcccaaaagcttattaagctgataagcaacttcagcaaagactcaggatacaaaatcaaagtgcaaaaatcactagcatcagtcaagctgaaagccaaatctccagtgaactcccattcacaattgccacaaaaagaataaaatacctaggaatacagctaacaagggaagtgaaggatcgctacaaggagaactacaaaccactattcaaagaaatcagagatgacacaaacaactggaaaaacatcccatgcttgtggataggaagaatcactgtcatgaaaatggctatgcgacccaaagcaatttatagattcagtgctattcccattaaactcccactgacattctacaaagaactagaaaaaagtatttaaaaattcatatggaaccaaaaaaaggagcccaaatagccaaggcagtcgtaagcaaaaagaacaaaactggaggcatcacactgccctacttcaaactatatatatgtattttttttattttttatttatttattatttattttttttcttgagatggagtcttgcactgttgcccaggctggagtgcagtggcgcgatctcggctcactgcaagctccacctcctgggttcacaccattctcctgcctcagcctcccaagtagctcggactacaggcgcccgccaccatgcccggctaattttttgtacttttagtagaaacggggtttcacggtgttagccaggatggtcttgatctcctgaccttgtgatccgccctccttggcctcccaaagtgctgggattacaggcgtgagccaccgcgcccagcctacttcaaactatattacagggctacagtaaccaaaacaacgtggtgtggtacaagaacagacacatagaccagtggaacggaatagagaacccagaaataagactacacacctacaattatcttatcttcaacaaacctgacaaaaacaagcaatggggaaaggattccctttttaataaatggtattgggatacctggctagtcataagcggaaaattgaaactggagcctttctttataccatatacaaaaatcaactaaagatggattaaaatgtaaaactcaaaactatgaagaagaaaacttacacaataccattcaggacataggcacaggcaaagatttcatgatgaagatgccaaaaacagtgcaacgaaagcaaaaattgacaaatgggatctaattaaactatagagcttctgcacagcaaaataaactatcaatcaacagaataaacagacaacttacagaataggaggaaatgtttgcaatatacacatccgacaaaggttttttttgttgttgtcttttttttgtttgttttttgagatggagtgttgctcttgtcgcccaggctggagtgcagtggcgcaatcttggctcactgcaacctctgcctcccgggttcaagtgattctcctgcctcagcctcccgagtagctgggattacaggcgcccgccactacacccagctaattttttgtatttttagtagagacggggtttcgccacgttggccaggttgatctcaaactcctaacctcaggtgatccgcatcccaaatactgggattacaggcgtaagccaccatgcccggcccccgacaaaggtcttatgtgcagcatctgtaaggagcttaaacaaatttacaagaaaaaaaaaacacacactaaaaagtagacaaaggacatgaacagacagtactcaaaggaagacatacatgtggccaacaatcacaagataaaaaagctcaatatcactgattattagagaaatacaaatcaaaaccacaatgagataccatctaataccagtcagaatgactattattaaaaagtcaaaaaataataggtgttggcgaggttgtggagaaaaaggaacacttttacactgttggagggtaaattagttcaaccattgtggaagtgtggcgattcctgagagacctagagacagaaataccatttcacccagcaatcccattactgtgtatatacccaaaggaatataaattgttctcttataaagacacatgcacacgtatgttcattgtagcactattcacaatagcaaaaacatgcaatcaacctaaatgcccatcaacgatagagtggataaagaaaatgcggtacatagacaccatgaaatattatacagccatacaaaggaccaagatcctttcctttgcagggacatggatagagctggaggccattatccttagcaaactaatgcaggaacagaaaagcaaatacttcatgttctcacttataagtggaaactaaatgatgagaacacatggacacgtagaggagaaaaatgcacactggggcctactggaggacagaaggtggaaggagagagacaggatcaggaaaaataactaatggatactaggcttagtatctgggtgatgaaataatccgtacagcaaacccccatgacacacatttacctatgtagcaaagctgcacatcctgcacatgtacccctgatcttaaaagtttaaaaaatatatatcatgatatagctaattgaccctttatgcaaacacagtgaatgaattcccattagaagacatttaatcacttccatttaaatactgaggaatgatttttatttatttatttatttattttttggagacagagtctcgccgtgtcgcccaggctggagtgcagtggggtgattacagctcactgcaacctccgcctcccgggttcaagcgattttcctgtctcagcctcccgagtggctgagattacaggcgtgtgccactacacacggctaatttttgtatttttggtagacacggggttttaccttcttggccaggctggtctcatactgctgaacctcaaatgatctgcccgccttggcctcccaacgtgctgggattacaggtgtgagccaccgcttccagcctgaggattgaatatttgcattcatttacaagtcctcttgaaaaggcataacaatgatgttgattggcttaaaataaggttaaaaaacccacaaggggccaggtatggtggctcacacctgtaatcccagcacttttggaggctaaggctagaggatcacttgagcccaggaatttgagaccagcctgggcaagatatccatctttacaaaaaaatttttttaaattagccgggcatggtggcatgcctgtggtcccagctacttgggaggctgaggcgggaggattgcctgagcctgggaatttgaagcagcagtgatctataatcatgccactacactctggcctgggtaactaagtgagaccttctctctttaaaaaaaaaaaaaaactaaaagacccacaaggatgaagagaccagggaatagacagaagcaacgttctggaagttggaaataagaaggatgagtggtaatttatttaacaaactaagactgtctgtgaggtacagatgtggccagaaacaaaagggaattagttggttaaaagcatatataagaaacattttacagccgggcgcggtggctcacgcctataatcccagcattttgggaggctgaggcaggcgattacctgaggtcaggagtttgaaacctgcctggccagcatgaagaaaccttgtctctactaaaaatacaaaattagccaggcgtagtggctcatgcctataatcccagctacttgggagactgaggcaggagaatctcttgaacctgggaggcaaaggtaacagtgagccaagattacgtcattgcactccagcctgggcgacaagagtgaaactctgtctcaaaagaaaaaagaaaccattttacatgataattgtcttgaatgtttcaaaaatggcaatgtcatgaaaagacaaaaaagagaaaggacgattttagattaaaggaatctgaacaacataacatgtaaagtcgggttctcaactggactcagcaacaacaaaaagctatattagacattcagagacagttgtggaaatttgaatatgtactatatatcaaatatttttattgacattatagtaaatctcttggacattcagaaagaaaacaacaattgatgaatctaaaagtgaagatatgtagttgtatattgtatgactctttaatttttctgtaggcttgaaattttgttagataaaaagttaatgtgagggaggtattaaataaaggagcagggaggaaaaagcggcagtggtgagacacctagatgagccttctcccttctgcatcagttcatcacccttcctacctacatcctcccccttcctacctacatcctcccccttcctacctacatcctcccccttggaagagctactttgctgcaaaggttgaaccaaaagattgtgaattcagggcaccagactaatttccagtagctgagaacagagagatacactgctttattggtgtatcagcaactctggctgaccgactttcacccttcagaccaaagatattgacttggctggatactctatagtaaacaccagttaacaagcacaaattaagaagcataccacaagaacttactaaaagaattttaatgcttaacctaaccatatcacttaaatttaactttcatatgaaggaagacctttttcattgaagattgtgcaaatattaacctacacagacacagtaacctctgttgacacattaaggcttttgaatcatgacattaaatttctatttcataatataccattttcaattttttaaatcagtgatcataaaataagtaaatattatgtagaaaaatacatttgactcaccctttgagtgatgtttaataaaattgttaaactaaacatgttagctttgtaaagatgcatcattataaaattttttttatttataaaaacagttctctggtaaaaactggaaaacctactagataaatttgaaaagggctgtaatgctctttttttgtatgacttttaatattgcccatatcagcctgtaatttactgagctataaattatgttaaacaaatataaacttatatttgaaaactgtcctgttcatggaagtttctactgattctgttgtaagtaaaagattttaaagttatcttaacattctggtaacactattcagattttggagtaaacctttctttgctgttggaacaggaagccatgcagtgtgtggaagagctgaatgcccagggcctactacatgtttttgtgagagtgggagtggagtccaccctggaaaggagccagatcaccagggatcacatgggccaactactctatcagctggtacagtcagaaaaactcagcaaacaggactttttcaaagggtcagtatcctcttcaagagtggtattcagttactaggctcttgggtaccagttaattttcaaagtacttacctctttaagtatttagttttttccatagatgaaaattgtatccactgtaatatgttgatatgatgcaattaatatattgatatgttggttgatgtgatggcattttatagattgtgctagggcataaaggttatcttttggttttctgaatattattgttagatctctatcatgttgtaagtaaggtaacagagaccccttagcctcagggaaactctgaggcctttagcagcccatttacatgtgatccccaaatgttctttgaggaaaaaagcttttctttgtgagaacaattctgaaaaattgtcttaaatttaaaaaccatattctttcaataaaccatggttattgtggctaggaagcacttgtgtgcccactctagcctcatggagaaggttatgtaacttggtgttcttaatgatttagtctatttcaggttggtttcattatgattcttgtcaatggatggtttgataaggtctgcctatctgcctgtcactggtggtgaatcctcatttgatcaggttctggtatatttgtgatataccatcatcacaagtacatggatcaggttccttgtggttcagccacaaaatcttacccaggcatagggtgtataaccaatgtttaaagtgaaaattgcattggtaaaaaattttgttttaggagccatgttgtatcaaatataaacacagagtcacacccagcactgacagatgcccactctctaagggaatagcaactaggatctcctaaggtctggacattggattaacatctgccatctcatcctcacctggacatatgcttattgaatcaaatggcagtaagaattctgtactacttgtaattttcctctttttttttttttttttgccaagctcatgttctcataaattaaatgcacatatgattaaatgccactgtatatttttccgtagtcatttcacatatggcaatccttttagaataaggtaaccattaaatgtcattgttggccaggtgcagtggctcacacctgtaatcccagcactttgggaggctgaggcgggtggatcacttgagatcaggagtctgaaaccagccacggccaacatgccaacatctactaaaaatacaaaaattagcccaacgtggtggcgtgagcctgcaatcccagctacttgcgaggctgaggcataagaatcgcttgaacccgggaggcagaggttgcagtgagccaaggttgcaccactgcactccgcctgtctcagtctctaaaaaacaaaaaagtcattgttgaatttattcgtttgactttgcaagcaatgacagcgttgtcttctaggtcctagaaaatttatacttgcccctaggaccattaaaaagttttcttgccaggcgtggtgactcacgcctgtaatcccagtattttgggaggccgaggtgggcagatcacgaggtcaggagttcgagaccagcctgaacaacgtggtgaaaccccgtctctactaaaaatatgaaaattaggctgggcaccgtagctcacacctgtaatcccagcactttgggaggccgaggcgggtggatcacaaggtcaggagatcgagaccatcctggctaacatggtgaaaccccgcctctactaaaaatacaaaaaattagccgggcgtggtggcacgcacctgtaatcccagctacccggagaccaaggcaagagaatctcttgaaccagggaggtggaggttgcagtgagctgaaattgcgccactgcactccattctgggcgacagagcaagactccctctcaaaaaagaagttttctttcaggctgggcatggtggctcacacctgtaatgctagcactttggaaggctgaggcaggaagattgcttgagcccaggagtttaagaccagcctgggcagcatggtgaaactccatctatactaaaaatataaaaattagctaggcatggtggtgtgcagctatagtcccagctacttgggaggttgaggcagaaggattgcacctgggaggtccagactgcagtaagccatgatcacaccactgcactccagcctaggtgacagaatgagaccacgtctggggaaaaaaaaaagttttctttcagcaataagctagattgctctgaattaaggccatttgaaccagttagtaagacactttggcaaaagttgctgtggttattggtttttaaggccaggatggtttcccagttttaaaagagaagcctccaattcagtccagtaactagccagtgcaaatggtaagagcaaataaaggtatgtacaccctcacaatcagattgaatatggtcctcccagcagacttgaaactataatttcctagaaataatactgttggagtgacgaggatatccatttataaatagttacttattacccagatattatgctacattcctcagaaaattctggaaatgataatggtaaattatcatttaccattttctgtctcttcaaactatactcggaagttgattcatatctataaagatgcccagaagcatagtctacctttattggctataattgaacttgtgagatactagcttagtctctcggatatctcagacatttgcatttctccctttgtgggattctctgaagaaaaaatatcataaccagacgtggctacagttttgttgttggtgttagaattgctgttgccggcaataattaccacactactaccttttatttagacataaaatgaggttaacacttctgtgtctcagcaattacttcatgtttcaccatacctgcttccgtctgcagctagaggcagtgcagtgactccaggcctaaccttcgatgcttagacctaaccagtcttggaccttagaccaagacatgtaaaagttgtactattttattctaaatggagaggcctgacaatttagtgccacctttttctaagagggaaatgtagggattgcttcatgtcagtgtccaccaagagctttcttgcaagcagatcagaatttcacaatcccttctaaagcctgagttataaatggttcatactgtctagagaggccatttcattggagccatgaagataccctgtcttttgcttctttattcttaacctacaaagatagtattgtccttccatagtattgtggaagagcctctgagatcagctgttttgggtgctgctactgcttagatgtcaacttctgaacagttggggaagcagtttctgcctagctcgccaagccaatgataactctgggaaggttagaaagcagaaagccagccaggcgcggtggctcacgcctgtaatcccagcactttgggaggccgaggcaggtggatcacgaggtcaggagatcgagaccatcctggctaacatggtgaaaccccgtctctgctaaaaatacaaaaattagctgggcatggtggcgcatgcctgtaatcccagctgctcgggaggctgagacaggagaattgcttgaaccagggagtcagaggttgcagtgagctgagattgtgccatggcactccagcctggcaacagagactccttctcaaaaaaaaaaagaaaagcagaaagcctccaggtatactggtccctggtgaggtagctactaatctgccatttctccctatagctctttagagtatgcactgctgcaaagtagtaaaatagacaaaagtttcaaataggctttatgaatatagcttttaggtcctttggaattttccttacaagatgttatatcaactgtgagcataatagttgctgtatgtgaaacatatctccgcaaagaaaacatcaagccatcgtcctgatattttcaggacttgaatctaaatactttatgaccctagttaggttggtaggtagataggtagaagcattattgtataggtacatgcacttcaaacagtgtgttgatagtctttttatatcatgatttcagaaaacttctttttaaaaactgtctagtaaatatagttgagtgcagtttgctgttagtcacagaactggaatgactttgaaagtataataaacaaatgaagaccaaggttgtaaaaattagagtggacaatagacacaaaatatgtaccctagaggaagattgatacattaatatttcactttgggagatgttttgttagagaggaaattcttatctcttccttgaatacttttctggaacctttattactgcttacggcaattctacattggtaaaagaccctatgtaggctggacacagtgattcattcctgtaatctcagctaccagggaggctaagatgggaggatggcttaaggccaggagttcaagaccagcctgggcaacatagcaagaccccatctgtaaaaaaaattaacaaaaaaattggctgtgcatggtggcacgtgccaataattacagctacttgggaggctgaggcaggaagattgcttgagcccgggagttcaagctgtagtgaactgcgagagcatcactgcaccccagcctgggcaacagagtgagatcctatctttaaaaataaaaaacactttgggaggccaaagtgggcaaattgcttgagcctaggagtttgagactagcctgggcaacatggtgaaaccctatctctaccaaaaaatacaaaaactctctgggcatggtggtgggtgcctatagctgcagctactcaggaagctgaggtaggaggattgccatactgatcttgtaaaatgacttgggaagtattttctccacttcaattttttggaagaatttgagaagaatttgttcttcttcaagtgtttggtagaattcagcagtgaagccatctagtcctgggcttttttttttttctctctgagatagggtcttgctctgtcacccaggttggagtgcagtggcttcatcgtggctcactgcaacctcaacctcctgggctcaagtgatcctcccatctcaacctctcaagtagctgggacagtaggtgcatgccactgtgctcagctgattttttattttttgtagagatggtgtctcactatgttgcccaggctggtcttgcactcctagacaaatgatccttccaccttggcctctcaaagtgctgggattacaggtttaaggcagtgcacctggccatgattcagtcttgatttgttgtatatatctatgagtttatctgtttttttctagattatccatttattgttcatagtagtttcttatgatcctttgtatttctgtggtatcagttgtaatatctcctctttcatttcttattttgagtcttctgtcttttctcctagtctagataagggtttcttgattttcttcatttttccaaaaatacaactccgagtatcattgatttttttctttcattttttaagtgtctatttcatttatttctgtttagatgtttgttatttccttccctgtgctaatttggggcttagtttgttcttctttttctagttccttgatgtgtaatgaatggtatattgtttgagatcttttttcttttttgatatagatgctcattgctatacatttccctcttaggagcacttttgctgcattctataagtgtcggtatgttgtgtttccattttcatttgtctcaagatattttttaaaaattcctttctaatttcttctgtgacctattggttgtttaggcagatgttgtttaatattcacatatttggatattttccaaggtttctcctgttaactgagttcaagttttattgcattgtgatccaaaaagatacttgatatgatttcagtcctcttaaatttgttaagtcttgttttgtggtctaacatatgatctattggggagaatgttttatttgcactttagaagaatatgtattctgctgctgtttaatggaatgttctgtatatttttgtttggtttaaagtataattcaagcccaatgtttccttactgattttctgtctagatgagttgttcattgtctaaagaagggtattgaggtcccctgctcttgctgtattgtagtctgtctttcccttcagataatcaattgccctatgtttttaggtactccaatttgaggtgcatatgtatttataactgttatatcctcttagtaaatggattcctttatcattacataatgacctttgtctctttttatagtttttgacttaatgtcctttttgtctcatataagtatagctacccctgccctcttttgatttctattttcatgaaatatctttttccttctcttccttttcagtctatgaatgtccttagtagtaaagtgaatctcttataagcagcatatggttggatctcatttttcatttatttattttttagattttgtgagagtcacactctctcacccaggctggagtgcagtggcgcaatcaaggctcactgcaacctctaccttctggactcaagcaatcctcctgggtagttgggaccacagccatgcatcatgatgcctggctaattttttttatttttttatagagacagattctccctacaatgcccaggctggtctccaacaactaggctcaattgatcctcctgccttgacctcttcaagtgttgggattacaggcatgagccattgcgcctggccggatcttattttttaatctatttagccactcagtcttttgattggaaaatttaatccatttacatgtgacataattattgatagataaggacttgctactgccattttgtaatttgttttctggttatttttgacaataccactttcaattgtggtagcattattttgcttttttgaaagatttcttatcagaactttactgcgttaaaatttttaaatatttttcttccaacactatgttgaataggagtggtgagagagggcatccctgtcttgtgcccgttttcaaagggaatgcttccagtttttgcccattcagtatgatattggctgtgggtttgtcatagatagctcttattatgttgaaatacgtcccatcaatacctaatttattgagagtttttagcatgaagcgttgttgaattttgtcaaaggctttttctgcatctattgatataatcatgtggtttttgtctttggctctgtttatatgctggattacatttattgatttcctattcaacatagtgttggaagttctggccagggcaattaggcaggagaaggaaataaagggtattcagttaggaaaagggaagttaaattgtccctgtttgcagacgacatgattgtatatctagaaaacccctttgtctcagcccaaaatctccttaagctgataagcaacttcagcaaagtctcaggatacaaaatcaatgtacaaaaatcacaagcatttcttatacaccaacaacagacagagagccaaatcatgagtgaactcccattcacaattgcttcaaaaagaataaaatacctaggaatccaacttacaagggacttgaaggacctcttcaaggagaactacaaaccactgctcaaggaaataaaagaggatacaaacaaatggaagaacattccatgctcatgggtaggaagaatcaatatcgtgaaaatggccatactgcccaaggtaatttacagattcagtgccatccccatcaagctaccaatgactttcttcacagaattggaaaaaactactttaaagttcatatggaaccaaaaaagagcccgcatcgccaagtcaatcctaagccaaaagaacaaagctggaggcatcacactacctgacttcaaactatactacaaggctacagtaaccaaaacagcatggtactggtaccaaaacagagatatagatcaatggaacagaacagagccctcagaaataacgccgcatatctacaactatctgatctttgacaaacctgagaaaaacaagcaatggggaaaggattccctatttaataaatggtgctgggaaaactggctagccatatgtagaaagctgaaactggatcccttccttacaccttatacaaaaatcaattcaagatggattaaagacttaaacgttagacctaaaaccataaaaaccctagaagaaaacctaggcattaccattcaggacataggcacgggcaaggacttcatgtctaaaacatcaaaagcaatggcaacaaaagacaaaattgacaaatgggatctaattaaactaaagagcttctgcacagcaaaagaaactaccatcagagtgaacaggcaacctacaaaatgggagaaaattttcgcaacctactcatctgacaaaggggctaatatccagaatctacaatgaactcaaacaaatttacaagaaaaaaacaaacaaccccatcaaaaagtgggtgaaggacatgaacagacacttctcaaaagaagacatttatgcagccaaaaaacacatgaaaaaatgctcatcatcactggccatcagagaaatgcaaatcaaaaccacaatgagataccatctcacaccagttagaatggcaatcattaaaaagtcaggaaacaacaggtgctggagaggatgtggagaaataagaacacttttacactgttggtgggactgtaaactagttcaaccattgtggaagtcagtgtggcgattcctcagggatctagaactggaaataccatttgacccagccatcccattactgggtatatacctaaaggactatgaatcatgctgctgtaaagacacatgcacacgtatgtttattgcggcattattcacaatagcaaagacttggaaccaacccaaatgtccaacaatgatagactggattaagaaaatgtggcacatatacaccatggaatactatgcagccataaaaaatgatgagttcatgtcctttgtagggacatggatgaaattggaaatcatcattctcagtaaactatcgcaagaacaaaaaaccaaacaccgcatattctcactcataggtgggaattgaacaatgagatcacatggacacaggaaggagaatatcacactctggggactgttgtggggtcgggggaggggggagggatagcatcgggagatatacctaatgctagatgacgagttagtgggtgcagcacaccagcatggctcatgtatacatatgtaactaacctgcacaatgtgcacatgtaccctaaaacttaaagtataaaaaaaaaaaagaaaaagtaagatgattggaaggaaaacaataaaatgatccttattttctggtaacataaaaaaaaaaaaagaaaaatgcaaaggcaaagaatcgatcaggttggcagaagctgttccctggcttatgggcaggagggagctggtgaggctttggaaattctattgctaacactaacacgggagatctttctggcctttctggttttggcaatggctctttttctcctgccttctaaggtactacaggaaaaaatatttcctctacctccatcccacattgcccaggaacattttaaagattgaaggctttctcaaaaaaaaaaaaaaaaaaaatttaatatttttcttttaatcatgtatccctttcttcaattaaaattttacacaaaaacccagtaaataaaatgaagtggagcttttgtagttgaaatgggcggagggatatctgcagtctcatctatgtagaccttaccaaagttcagtccagtggctgtggttttttccttccacccaaagaaaagcctgacagtccaatgactgtgatggtcactacatgccaagaggcaagggtatgatgtagctctgtttcattttttcagcttttagaaaataacgtgtggtgcaaagcattaatataggctatgtagtagtgcaaagacataaagacagttattacctaggtgcttcagcacactcaagatttttcttttagaatcatgcaacaggatttaagaactgtaaacctgaaaaaaaaataagcttcttacaggcttgttctatggaaatcctatgttcagccaaaaaagttttttgttagcagtatagatttgaccactgattgtgttctgtggactgtcccatgatgaactgactgatcaaggcataaaaaaccaaagcaagaatatgggtatattttatttgtaatgagataaaatatatgagataaaaatagcagcaggtacactgctgaaagaccagcatggctacagttgtctcttgggcccattaaacagcttaatttatgctgctagcccacagagcatgagttggcaggatcaggtggttaacctagaaatcctggagtccagctagattatatttcatcagtggtacattaactgaacccaaagtatgcacataatgagagaacctgcaattatttgacatctatttgccatagcacagacaccgtcctcggcatcaaataattgcaagctgtgaggtcagaaagttggaattaaggattcatgaagcccagagttagataatatggctgagctgcaaactgttttgaagtggcagcttcagaatggtgaccctgcctatggtggtagctctttttaagtgaaaagttttagtgagatgtaggcctctgaaaaaagggtggcatactttggctagaacctggaactgcagtggaaaagcacacgttttacaattgtagagatctgaaagggcatgcatacaattaccacctgctcttagctcttcaattcattcctccctttccttatgacttgcaattatgtgtatgtctcctgtagttaaattcatttgcttttgtactttattatatattgtatgtggaaataattaacaaagtcttgagttgtttgtttatacttccaaatgaacagctatgatttttagcctacataagagtgctggtattttatatttgattttcctaagttttatatttaattcccatttgcttgacattgagaaatatttataattcatagcacaaaagcctgaaaccattagcttttctgtagagatagaacagttcgtaacatgtaataatgatgatagtgttagtaatgttgccagactcttttatatccatccagttttttccccattgtaagattcctcaaggacacagatttttgtgttttacagtaagtgtttagtcagtgcttttgactgactcagagaatatgatattcaactgtggtgaattctttatagtgcaggattaaatggataatttttcccctagaacttcacaggactgtccttcttttcatcatttaaggctttcaaatgtcacctttatatggaggtattttctgacctccttcttgtacatagttcatgttcttcagagtattagccctatttgcaagtatgcttttgtctgttctagtctttttcccccacgctaacataatctctttgagaatggtaatgtatttaccagtcactttgtggctagactgtacctaacatagcaggtgattaatatgtatttgttgactgattttttatctctttatttaattttaacttttgaattacatttgcatgtgatttttaccccctgttccttttcagtttttcagaaactttggaattggcagatgacatggccattgatattccccatatttggttgtaccttgctgaactggtgacccccatgttaaaagaaggtggaatctccatgagagaacttaccatgtaagttatacttgtttctcttgatatatatcaggtagaactgactaataactcacttgctagctctctatcatagtactgtcccattatcgcctttggagactcatgaatgcaggctgtgactctttaagacttctgatttcagtgtaaaaatgttaccttatgctaggtctacacctgagatattctggggatatgatagccctgtggtctgttgagggtagtggcgatgatagattggctccagaatcgtgtaactggaagatgactgcttctagaagcttaatgttcatctggcttttgtgtctatcattgcagtagtgctgtaagtagttatattttcccattgtaacttgtcagactgcattaccccatagtacatgctcatgattataataaaaggatgattataataaaacaaactgagatctcaagtattcctacatttggatgtgagtggggaatggatgctacgttatatagaccggtggttcccaaactctgttcttcgaaacactagtgtttccacaaaagttgtttatatagtcaaactttgcacatggtcatgtcccttttctttgagattaacaaaacatacttagcatattaaagtttatgacagtcctatagtaaagcaataaataaaaactagttagctttgtttaattcagcattgcctcacttagagtatagatatcctatggaacacagtttggtaaatgctgatttagactgttacaaaattggcccctttgctgtttcatccataatttcatctataaagaaaagcttcctttcttaaaaatactttatatatggccagacgcaatagcttacacctgtaatcccagcactttgggaggccgaggcaggcggatcacaaggtcaggaaatcaaaaccatcctggccaacatggtgaaaccctgtctctactaaaatgcaaaaattatctgggcatggtgttacgtgcctgtaatcccagctacttgggaagctgaggcaggagaatcgcttgaaccagggaattggagattgcagtgagccaagattgcgccactgcactccagcctggcgacagagtgagactctgtctcaaaaaaaaaaaaaaaaaaaaaactttataaaagcatcacaactccctgttacctaaggtgcttctcattttagcttgaagcagaacttacataaacaaacagattaccacatctgatctttgtgttgcttctgtcactgaagtggttaaagaaaaaggtaaaaaccaagaactcacatgtaccttttcaggaacttctcctgaaaatgacttagagcatgtcctggagctttggcttgcccagtattatgtaggttgcacagtatctggtttttggtcacacattgtttgcctcttgttctagaagaaaggatttctttagagatacttaatcactgctcctatcttttacagagaatttagcaaacctttacttcctgttggaagagctggggtcttgctatctgaaatattgcacctactatgcaaacaaatggtgagtgttacactgagtgtcagactcaacagtattattaggaagggcagtgatcttgatcttgggttatctgtgaatagcttaggtctcagggtgcaagtaattaagaatgaggtctctgcttcaacccagtttctttctgaggtgcatttgtccttctgtttgctaatatcttggggcagaattatcaaatctcgactagatttggtataattctaaagaatctcaagtcatgttttatttgtagttgattttttcttcctttgaaacaaaatggatatatcatttatatgttttaatagatttcaacgaaaagctccatagagctggaggctgtcagtctatggcaggctgtcagtctataaagtgggaacagataaatctaaaccaataatttcaaaagagtgaaagtgctttgttagaagtctaagaggtttggggaagtgttgtggcatcacaaagggaataaaatgtctaggatgagagggatgagagatgtcaaaacaaaacagaactcagaaatgaagattctggagtgatttctgacttacttacgcctgactcaaagatattggatgatagattttaatgtttaaagtcagtgtttcattcctccctctgatacagaagtccttctgtatcccatttgtgtggtagttattcataaacagatgtactaaatatcctggtctctagttctgttgactatttgttaatactactctttgcttaatggcactaaaatttttactgaaccctagtttttatgtccaaaatttcctcctctccgacctacttgactttagtccttatttaaaactcacattctggccgggcgcagtgattcacacctgtaatcccagcactttgggaggccaaggtgggcagatcacgaggttaagagatcgagaccatcctggccaacatggtgaaaccctgtctctactaaaaatacaaaaattagccaggcatggtggcacgcacctgtagtcccagctacttaggaggctgaggcaggagaatagcttgaacccgggaggcagaggttgcagttagccgagatcatgccactgcgctccagcctggcaacagagcaagactctgtctcaaaaaaaaaaaaaaaaaaaaaaaaaaagaaagactcacattctggctggcacagtggctcacgcctgtaatcccagcactttgggaggccgaggcgggtggatcacttgaggtcaggagttggagaccagtctggccaacatggcaaaatcccatctctactaaaaatacaaaaattagccaggcatggtgacaggcacctgtaatcccagctacttgggaggctgaggcaggagaatcgcttgaatctgggaggtggaggttggagtgagccaagattgtgccactgcatttcaacctgagctacagagagagactctgtctcaaaaattaataataataactaaaaactcacattcttactaactttgatgtgtagaaacagcacaaccctacttccaaataaaactaaattctcatatagtataagctttggagccagatggccgagttcaaattctggttcaactatattttcagctatgccttggacaagttactctatgaagtaattaatacatacctctcagatgacagcaacagcctcaaacctggcattttccgttgtcactgtaactttcttcaggtagaggacttgtacctcttcacttttttctacctgacaacagctcttctttattctctctcttgggctcaaccttgtgcttcttgcccttgaaacacttctcattcctggttcaggagcaacaactgctttaagcctccttgtatcaggcagcatggctgtgatctattatgaagagggattctagtgaggcttcttgaatggctttaatagcagatacatacagagctatctaggaaaagacacagtgtggaatttataaactctgtgtattggactttttttgatgtttataaatcccaaataaccagctgtagctccccagattagtcacctcataaatcaattatttaatcttaagcagctgtacttcaattattcaccattgtatttatgtgcattcagacatcttagtttgaaagtcacaagtcttaagagattaactttttatcagtgaggaaaagtttgttttcgagactggtcttgctgtgtgtgttgcctgggccagactcatactcctgggtgaaagctgtcttcccacctcagcctccctagtagctaggactatacaggtgtgcaccaccatgccctgctggaaacgttttgatttttcagctttttggggtttgcactgtttgacttcaagcaaatctttttttttttttttttttctgtttcttcttccactgtgaaagtaaatggattggatttatctctattttagagccataagaaagtgggagccttatggagggaggctgacctcagctggaaggactttttaccagaaggagaagatgtacataattttcttttggagcaggtaagaacaaggcttatgttttgctgtttgatagtagttgatctatttcatagaggaagtgaaggtaatttccttcgtattccagtcgttaaaattgcatcaaaataggaatcttggtaaagatgtccttttaagttcatgcttttaaagccactccaactgtgtggtcatcagatgattgatatttaaaaaaagaaaatgtaaaagacttagcaacctatagaaaaacaagctacagcaagcagaaatgaagttaacaaataaagcagggtgacagggccaaagctgtctcctgatttctgggtctgatggcaggccagaagcagccagaagttattctgtggggaatggagaccattaatacccttataaggtagaagattagagacaagcttatagcttgaaactacacaggtaaataagtgcaaggaagtagacacagtcttatacccagaaccttagctatcctgcctactgactggtaactagatccagaaatctacaaaacagaagaccccatgatcagtataatctggtcctataggaggatttgtgggctgttaggttgaggtaaccataaaacaaattagatcaagaaaagtaacagaaagaaaacaaaactctctcaaaacgttactgaaaatcaaaatcctaaaactcatgaggaaaactaaagctaagacagccaacaaaatcaggaataaggagaaaaaaaatcaccataggtaaaaagagaacaagaatgcaatctgaaaatgactttaaaataagtattttgttctggataaagatattatattaggttgctacagacattagctttctttttggttgtagtctggaacactgaagagcattcttgccacagcaataagaacctgcatgaagcataacttctgatgtgttactggacttagaagaggtggaagtaatttccttcaaagggacaaaaagaattaatgagggggaaaagccagagatgaaacctgaactgtgaatagtaattacatgtgaagggcatattgcccaaaggacacatagcccagtgggaagatactattacaaatgctgtcagatgtcatggaaaaagttgacttagtcccagttcagtattaccttggctcccagaagcagcaaatcaaaatgctctttggagaaacatcctcaacttaggtccccttattttctacaaatccaaattatttaaatatatgagttgacacttggtgttcatttaacatacaattaaagaagtaaagataaaagtaaacagacaataagtagtagatttagaccccatggacttgaggtaatggaattatcattcagagtataaaataacactatagtaaaagaaagaatcacaaaaatgagcaaacaagagactagtcaaaatggttaaagagatttgaaaagaaaagaaaaggttgggtgcagtggctcatgcctataatcctagcactttgggaggctgaagcaagagaatctcttgaagccaggagttggagatcagcctgaacaacatagtgagacctgtctctactaaaaaaaaatagctaggtgtattggtgcacctgtagtcgtaagctactcgagagactgaggcagaaggatcactagagcgtgggagtttaaggctgcagtgagatacgatcacaccactgcactccaacctgagagacaaagtgagagcctatcaaaaataaaaaataaaataaataaacaaaagccacacacacacacaccaaaatctgtaggtagctatctaagatatgttaatatgttaggagatttggaggaaagaatgagagaacatctaacctatctaattggagtcccagaaggaaaattagcctaaatggagaagaggcaatatttgaagagacagtggctgagacttctagaagtgataaaatatacaaatctataatgaaagcccatatatgcaatacaggataattatattttagtgaaactgcataataccaaagacagatgaaagattttaaagaagctgggaagaagaagcacattacttacctgcctccccctcaaaaaaaaaatacacaaaaaattagactttgcagtagcaaccatgaaagccagaagatggtagaataatctcagagtgctgagaaacgagcagtaaatgtagaattccctgtgcagctgaactaacctttaagaattagggcaatgcatactgagaaacttaacaacatacttctaaatacccatgggtcaaagaagaaatcaaacatgatagtaaaaaacatttttaactgaatgaaaacaaaaccacaacatatcatcgatatttagaaaagaagaaaggtcaataacctcagcttcaaccttaaagaattagaaaaataaggccagacacaatggctcatgcctataatcccaacactttgggaggccaaggcaggaagattgcttgagcccaggagcttgagagaccagcccaggcaacagagcaagaccctatcaccaaaaaaaaaaaaaaaagaaattagaacaataagaacaaatgaagctccaagcaaatagaataaaggaaataataaacattatatcagaaatcaatgaaatagaaaaatttttagagaaagaccagtgaaatcaaaagctggttctccaggaggtggaggttgcagtgagccaagattgcaccattgcactccagcctggacaaaagggcgagactccgtctcaaaaaaaaaaaaaaaaaaaaaaaaaaagctggttctttgagaagataaaagtgataaacctctagccagattgatcgtgaaaaaaagtttgaaaagaaggtacatattactaatatctggaatgaaagcggtaacatcagcacagattctatacataaaagtgggtgaggaaattttatgaataatctttatgtcaataaatacatcagccaggcgtggtggctcatgcctataattccagcactttgagaggccgaggcgggcggatcacgaggtcaggagttcgagaccagcctggccaacatggtgaatccccgtctctactaaaaatacaaaaattagccaggtgtggtagcacacgcctgtaatcccagctactcaggaggctgaggcaggaaaattgcttgaacccaggaggcagaggttgcaatgagccaagatcacattattgcactccagctctgggtgacagagcaagactccatattgggaaaataataataataataatgtagggtttatcctagaaatgtaaggtgggtttaatatttgaaaactgatgtatacataatagggaagatggtgaagtatacataatagagaagtatacataatagagaagtatacataatagggaagatggtgaagtatacataatagggaagtatacataatagggaagatggtgaagtatacataatagggaagtatacataatagggaaggtggtgaagtatacataacagaagtatacataatagggaagatggtgatgtatacataatagggaagatggtgatgtatacataatagagaagtatacgtaatagggaagatggtgaggttccaggattcaatccctccactgacacaactattgaactggcaagatctgttagagccaactgttttagaactgtggagtctcgttaaatacatgcattatcaacaccaggggattgcataatgaaaaaagagtctgataaatttcagtgaatttgggaattttgcatagaacttaccagtacccagcccagtggcagaccaccaggaaactggcatcacaccatttctggtgcagcttgctggtgccaggttgaacaataaggacttcattttccaaggattggggttgtgtcttttaattgacttttagttgactgagaggccagtgctggggctggctgttatttcaactctttcatgctgaagtatcttttagggctgtgactatcaaaagtatttaagcagtagtgttaacgggatctctggagtgtcgatttttttggccagaaacctctgtggccatggcacctttgcccgagttcttttcctgtgtccaggaagaatgaggtacgcaaacaaatgaagggtgaagaagagttttatttagtgttagaacagctcagaggagtgggtagctcctctctagtaggcaggttgtcccatggagtgttcagctctctgtagagaggaggctctggagaggatagctcctctccacaggcaggtcgtttggacatttctgcaggtctctgaagctctcagaggagagggtacctcctctctcctggcaggtcatctctgcagctctcagcagagaaggcattcttctctgcagctggtcctccaatcgtctctctaccctctttgtcctctgcccatctgctaccctgttctggctgagtccagggcttttatacctcagaggggaagaaatgcatgccaattggtccataggcagccatggttgggcctggaagaggcaccatgagcccctactccactctgctggactggcatcccagcccccagccttcaggtcctccctggcctgagggtggggccttactggggaccctgcccccttccacccaggactctgtctgcctcctgctgccattcatggccctggggcttggtcccaaccccactccaagatcagagagcaggcaactctgagcctgcagggacagggggtctttcctgggacacccgagggtgctgactgcagagacgcccaggtgctgcatgcctaggagggcagccacagctgcaccccagagctcccaccccaccaactcagaagaggcagggctcccccttttcccgtcccctgcctgctttgtggaacgggaggcccaggtctgcagccgcaggtcaggcagctgcgacagcacccaggaggggagatcctgcctgctccctcaagaaaggctcgaatccacagctgcagtttgggtgggagggcagggctcctgcctgctccaaagagcaggaggcttgggtccgcagctatggtttgggtggctgcagtagcacaggcagcttccatcccaactcagaaggggcagggctcccaccggctccatgcagtgtacggccccagctgcacctccctgctgcagccaatagtatctctctctctgtctctctctctttctttctgtctccagtctctctgtctcctctcctctcccctctctcctctttcctccttctccactccctctccctgagtcctctttttttgttaatttaacttttattttaaggtcaggggtacatgtgcaggtttgttctataggtaaacttgtgtcatgggggtttgctttacagattattttgtcacccaggtattaagcctagtacctattagttatttttcctgatcttctcccttctcccaacctctgccctctgataggttcgtgtgtgttgttcccctctatgtgtccatgtattgtcaccatttagctcccacctataagtgagaacacgcagtatttggttttttgttcctgcattagttcgctaaggatcacttggcctgggaggtcaaggctgcagtgagccatgatagtgccattgcactgcaacccgggcaaaagagcaagaccctgtctaaataaataaataaataaataaataaataaatatgagacttcagtttaaaagaaaaaaaaagcaatcggaggtcaaggctgcagtgagccttgatagtgccactgcactgtaacctgagcgaaagagcaagaccctgtctaaataaataaatatgagacttcagtttaaaagaaaaaaaaggcaaaataatatatatataataaaatgaatatataaaaatgtttatagtttgaaaaatgaggttgaaaaatacttggcctgtatcttgacttacagtttgcttaaacagcttatggccttcatgttgtgcttttttgcatatattggagcatcatggattggatgtatagttaaccaatactaaatcagaaaaattgtaatattgagccatgtttctaaaatcttatggagctgggtgcagtggtgcacactgtagtctcagctgctcgggaggctgaggcagaaggatctttgagccccagagttcaagtccaacttggcaacatagtgagaccccaagtcaaaaataaataaataataaaaccttattgggaaatataatttagagatgctacgtaagtggtagaaacggaacaatcagatgacagaactcaagactgtggttttcactttgtggattggggatagggtataggaccataccagagtattcaagagtattagagaaaaccttatgtgagtaatccttaatattttcatctttatggtttttgtataatgaagccacataaagcaaggcatacctatgtacttcatttctttagtcctttgaaaattatgaataattttgattatagattttttttttctttttgagacaggatctcgccctattgccaggctgcagagcagtggcacaatgacaattcactgcagcctcaacctcccatgctcaagcaatcctcccatctcagcctcctgagtagctgggaccacaggcgcatgccacaacacctggctaattttggtatttgtgttggtagagacggggttttgccatgttgcccaggctggtctcaaactcctgaactcatacactcctcctgccttggcctcccaaagtgctgggattactggtgtgagccactgcgcccagcctgattatagattttttaaaactatgtatctaagtgctaaacaattatagcatcatttctcacacctatattcgaaatggccacaacttaacaaagccaaaactatctagttttgatagctgctgagtaccaatactaatattaaaccataggttgcagaaagagagtgaaattgtacccttttctagggctcctatcctgccttaaagagctatgttgcagctaaggggaagattgaagctcaagattatttgcgtgtaaccatagcctagagataattatagggggttattaccttcttttttaagatacacggtatgagaagttggaaaaatattcagaaggataatggactgacagtttttcaaaactataatacgaacaggttgggcgtggtgagtcatgcctgtaatcccgtctttgggaggccaaggagggcggattgcttgagctcaggagttcaagaccagcctgggcagcatggcaagaccccttctctactaaaaacacaaaaaaatagccaagtgtggtggtgtgggtctggagtcccagctactcaggaggctgaggtgggaggattgcttgagcccgtgatgtggaagttgcagtaagccaaactactccagcctggatgacagagcaagaccctgtctcaaaaaaaaaaaaaaaaaaaaactacaaacataaaatagcctctgctgatcattttgattccatgtaaaatagaagacgtaacctatgactttgttcttctctcaggatgacaataacatagaattatattaatatattaatatgttccaccttttatgtttcagaagttggacttcatagagtctgacagtccctgttcctctgaagcactttcaaagaaagaactgtctgccgaagagctgtataagcgactcgagaaactcattattgaggacaaagcgaatgatgaacagatctttgactgggtagaggtataaagactatgtcaccttccctgatacctctacaggaaagattcttgtgggatccccttaattcgcttacctatcagttcacttcatgaatttttattatttatttttttttatttatttatttttttatttatttatttttttttttttattgatcattcttgggtgtttctcgcagagggggatttggcagggtcacaggacaatagtggagggaaggtcagcagataaacaagtgaacaaaggtctctggttttcctaggcagaggaccctgcggccttccgcagtgtttgtgtccctgggtacttaagattagggagtggtgatgactcttaacgagcatgctgccttcaagcatctgtttaacaaagcacatcttgcaccgcccttaatccatttaaccctgagtggacacagcacgtgtttcagagagcacagggttggggttaaggtcacagatcaacaggatcccaaggcagaagaatttttcttagtacagaacaaaatgaaaagtctcccatatctacttctttctacacagacccggcaaccatccgatttctcaattttttccccacccttcccgcctttctattccacaaaaccgccattgtcatcatggcccatccccaatgagccgctgggcacacctcccagacggggtggtggccgggcagaggggctcctcacttcccagtaggggcggccgggcagaagcgcccctcacctcctggatagggcggcggccgggcgnnnnnnnnnnnnnnnnnnnnnnnnnnnnnnnnnnnnnnnnnnnnnnnnnnnnnnnnnnnnnnnnnnnnnnnnnnnnnnnnnnnnnnnnnnnnnnnnnnnnnnnnnnnnnnnnnnnnnnnnnnnnnnnnnnnnnnnnnnnnnnnnnnnnnnnnnnnnnnnnnnnnnnnnnnnnnnnnnnnnnnnnnnnnnnnnnnnnnnnnnnnnnnnnnnnnnnnnnnnnnnnnnnnnnnnnnnnnnnnnnnnnnnnnnnnnnnnnnnnnnnnnnnnnnnnnnnnnnnnnnnnnnnnnnnnnnnnnnnnnnnnnnnnnnnnnnnnnnnnnnnnnnnnnnnnnnnnnnnnnnnnnnnnnnnnnnnnnnnnnnnnnnnnnnnnnnnnnnnnnnnnnnnnnnnnnnnnnnnnnnnnnnnnnnnnnnnnnnnnnnnnnnnnnnnnnnnnnnnnnnnnnnnnnnnnnnnnnnnnnnnnnnnnnnnnnnnnnnnnnnnnnnnnnnnnnnnnnnnnnnnnnnnnnnnnnnnnnnnnnnnnnnnnnnnnnnnnnnnnnnnnnnnnnnnnnnnnnnnnnnnnnnnnnnnnnnnnnnnnnnnnnnnnnnnnnnnnnnnnnnnnnnnnnnnnnnnnnnnnnnnnnnnnnnnnnnnnnnnnnnnnnnnnnnnnnnnnnnnnnnnnnnnnnnnnnnnnnnnnnnnnnnnnnnnnnnnnnnnnnnnnnnnnnnnnnnnnnnnnnnnnnnnnnnnnnnnnnnnnnnnnnnnnnnnnnnnnnnnnnnnnnnnnnnnnnnnnnnnnnnnnnnnnnnnnnnnnnnnnnnnnnnnnnnnnnnnnnnnnnnnnnnnnnnnnnnnnnnnnnnnnnnnnnnnnnnnnnnnnnnnnnnnnnnnnnnnnnnnnnnnnnnnnnnnnnnnnnnnnnnnnnnnnnnnnnnnnnnnnnnnnnnnnnnnnnnnnnnnnnnnnnnnnnnnnnnnnnnnnnnnnnnnnnnnnnnnnnnnnnnnnnnnnnnnnnnnnnnnnnnnnnnnnnnnnnnnnnnnnnnnnnnnnnnnnnnnnnnnnnnnnnnnnnnnnnnnnnnnnnnnnnnnnnnnnnnnnnnnnnnnnnnnnnnnnnnnnnnnnnnnnnnnnnnnnnnnnnnnnnnnnnnnnnnnnnnnnnnnnnnnnnnnnnnnnnnnnnnnnnnnnnnnnnnnnnnnnnnnnnnnnnnnnnnnnnnnnnnnnnnnnnnnnnnnnnnnnnnnnnnnnnnnnnnnnnnnnnnnnnnnnnnnnnnnnnnnnnnnnnnnnnnnnnnnnnnnnnnnnnnnnnnnnnnnnnnnnnnnnnnnnnnnnnnnnnnnnnnnnnnnnnnnnnnnnnnnnnnnnnnnnnnnnnnnnnnnnnnnnnnnnnnnnnnnnnnnnnnnnnnnnnnnnnnnnnnnnnnnnnnnnnnnnnnnnnnnnnnnnnnnnnnnnnnnnnnnnnnnnnnnnnnnnnnnnnnnnnnnnnnnnnnnnnnnnnnnnnnnnnnnnnnnnnnnnnnnnnnnnnnnnnnnnnnnnnnnnnnnnnnnnnnnnnnnnnnnnnnnnnnnnnnnnnnnnnnnnnnnnnnnnnnnnnnnnnnnnnnnnnnnnnnnnnnnnnnnnnnnnnnnnnnnnnnnnnnnnnnnnnnnnnnnnnnnnnnnnnnnnnnnnnnnnnnnnnnnnnnnnnnnnnnnnnnnnnnnnnnnnnnnnnnnnnnnnnnnnnnnnnnnnnnnnnnnnnnnnnnnnnnnnnnnnnnnnnnnnnnnnnnnnnnnnnnnnnnnnnnnnnnnnnnnnnnnnnnnnnnnnnnnnnnnnnnnnnnnnnnnnnnnnnnnnnnnnnnnnnnnnnnnnnnnnnnnnnnnnnnnnnnnnnnnnnnnnnnnnnnnnnnnnnnnnnnnnnnnnnnnnnnnnnnnnnnnnnnnnnnnnnnnnnnnnnnnnnnnnnnnnnnnnnnnnnnnnnnnnnnnnnnnnnnnnnnnnnnnnnnnnnnnnnnnnnnnnnnnnnnnnnnnnnnnnnnnnnnnnnnnnnnnnnnnnnnnnnnnnnnnnnnnnnnnnnnnnnnnnnnnnnnnnnnnnnnnnnnnnnnnnnnnnnnnnnnnnnnnnnnnnnnnnnnnnnnnnnnnnnnnnnnnnnnnnnnnnnnnnnnnnnnnnnnnnnnnnnnnnnnnnnnnnnnnnnnnnnnnnnnnnnnnnnnnnnnnnnnnnnnnnnnnnnnnnnnnnnnnnnnnnnnnnnnnnnnnnnnnnnnnnnnnnnnnnnnnnnnnnnnnnnnnnnnnnnnnnnnnnnnnnnnnnnnnnnnnnnnnnnnnnnnnnnnnnnnnnnnnnnnnnnnnnnnnnnnnnnnnnnnnnnnnnnnnnnnnnnnnnnnnnnnnnnnnnnnnnnnnnnnnnnnnnnnnnnnnnnnnnnnnnnnnnnnnnnnnnnnnnnnnnnnnnnnnnnnnnnnnnnnnnnnnnnnnnnnnnnnnnnnnnnnnnnnnnnnnnnnnnnnnnnnnnnnnnnnnnnnnnnnnnnnnnnnnnnnnnnnnnnnnnnnnnnnnnnnnnnnnnnnnnnnnnnnnnnnnnnnnnnnnnnnnnnnnnnnnnnnnnnnnnnnnnnnnnnnnnnnnnnnnnnnnnnnnnnnnnnnnnnnnnnnnnnnnnnnnnnnnnnnnnnnnnnnnnnnnnnnnnnnnnnnnnnnnnnnnnnnnnnnnnnnnnnnnnnnnnnnnnnnnnnnnnnnnnnnnnnnnnnnnnnnnnnnnnnnnnnnnnnnnnnnnnnnnnnnnnnnnnnnnnnnnnnnnnnnnnnnnnnnnnnnnnnnaggttcaagggattctcttgcctcagcctctgcctgccaccatacccagctgatttttgtgtttttagtagagacacggtttcaccatgttggccagattggtctcgaactcctgacctcaggtgatccatcctcttcagcctcccaaagtgctgggattacaggcatgagccactgcacctggcctgttttttgttttctcaagacaaggtctcgctctgtcacccatgctggagtgcagtggtgcagtcattgcttactgcagcctcaaacccttgggatcaagcagtcctcccaccttagtctcccaggtagctgggaacacaggcatgtgccaccatacccagctttttttttttttttttttttttaagagatagggtcttactatattgcccagactggtctcaactcctagcctcaagtgatcctcctgtctcggcctcccaaagtgttgggattacaggcatgagcctctgtgcctggctgagcaaggtatctttaattgttttatttctttttgacttcaggctaatctagacgaaatccagatgagttcacctacattccttagagctttaatgactgctgtttgtaaagcagctattataggtaagtaacatttctgaaggcagctcataacatctgaaatccccattatgtcaactactaagtatacagtttgattttacattgttttcaaaacttctcctatgtagctcacttttctgtgcactgtcctttctgtctgtgatgcctggttgtctcaagcgtggagacaaatagctgctccgcctacagagaacccagatctaaccagctaccacatgccttgcatgctccttgggttgtttttcactacgttgcgtgtagctttttctttatcttttcacttctaacattcagggccgcctcctccttccaataatgaattataatgaacaggttgaatattcttaatctaattatcagtatagggttattctcatcaaaaaagtcatgttatataagtacatacatgaagaaaaaaatatcaacagtttgtcctgttctttgttgactttatttgatatgataagacaattttattggcttatgaattgttaatattgataggattagggtcagtagaaatcccaaatattccaagctgtatacaatgtttaacattattcaatgaagacatctctttagtttcagatagaaattcatacttctgtcactgaagcgagaaaaaaaaattcatcagtgcaaaggtgtctcagaatttcaagtctgtctctattttgaagatggctttctgccacttaatatagcttcagaattgtaatttaagatttgcaatgaatttattttcaatgttctttaatgagataaataacaaagctaagtagaaagtcttcatgaaatttttaaaaatcattttcagtatccatagaaccatcataagactttcatgttttaaaattcgagttgggaagtccaaaagctgtttggtttttgttttcttgagatggtgggggtcactgtgttgcccaggctggacctgaactcctgggcttaagcggatcctatcgcctcagcctcttgagtaactggaattacaggcatgagccacgatggccagattttaaaagcaaaatctgcttttaaaaacaaaattgtgtcttagtgataacttacagataatataaacccgtatgtgtctttgtactgaggatgcttttcatttctcagcccctttttatcattcctttccctcaaaaggcctagattaggtatgttatctgccactgccacagttagtttttatcctagtaataacaaaatggttccaattattttagccttctgaaaagatttgtattaagtgtcactttaatttccttttctaatgttgcttttttatgttgctttttttaaatactcacttgaaattcctactccatgtttcatttatttttgattgacaaattataattgtatatgtttatggggtacaatgtgatgttttgatatacatgtccaatgtggaatgattgaatcaaattaattaacatatctatcacctcacttacctttttttatggtaagacatttgattaattttgcttttgtagtttgtcataaaaccacagtcactgtttcattacaattaaagataattgggtacgctactcctgagggaaaccagcattcaaaatgcatcccctccatagtttttattatttgtgagagaatgtctcattaataatttcagagcattttggatttcaaaatatttgccttagaccttcttgcctcctcttctcttgtagagccatatgggtcctttgtactcagaaaattgaaaatgagccaggttgcagtggctcatgcctgtaatcccagcattttgggaggccaaggcagaaggattgcttgagcccaagagttcaagaccagcttgggcaatatagcgagaccctgtctctattatttaaaatctaaaatagaagaagaagaagaagaagaaaggccaggagcagtggctcatgcctgtaatcccagcagtttgggaggctgaggcgggtggatcgcctgaggtcaggagttcgagacaagtctgaccaacatggtgaaaccctgtctctgctaaaaatacacaaaaaaattagtcaggcctgggagcaggcgcctgtagtcccaacaacttgggaggctgagacaggagaatagcttgaacctgggagacggaggttgcagtgagcttagattgtgccactgcactccagcctgggcaatagagtgaggctctgtctcaaaaaaagaaaaaagaaagaaaattaaagataattctatgttaactccttaaatgtaattcctagttcttctatcacctttagccgactcttctaccttcagagtggacactgctgttatcaagcagagagtgccgatcttactcaagtacctagactcagatacagagaaggaactgcaagcactttatgcactacaagcatcgatagtaaaacttgatcaacctgccagtaagtttatctcatgttacagttaatctaaccaatgagtgagatttatccaagccaggacttagagatgatttagggttcgaacaaaggacaataaaagaatcactaataacacaaactcatataactaactttaataaatttgaatttggccgggtgcagtggcttgcgcctataatcccagcactttgggaggccacggcaggcagatcacttgaggtcaagagttcaagaccagcctggccaacatggtgaaaccctatccctactaaaaatacagaaatggctgagcacggtggctcacacctgtaatcccagcactttgggaggccgaggcagatggatcatgaggtcaggagatcgagaccatcctggctaacacagtgaaaccctgtctctactaaaaatacaaaaaattagctgggtgtggtggcgggcacctgtaatcccagctacttgggaggctgaggcaggagaatcgcttgaacccaggaggcggaggttacagtgatccaagagcatgccactgcactccagcctggcgacagagcgagactctatctcaaaaaaaaaaaaaatacaaaaatacaaaaattggctaggtgtggtggcatgtgcctgtagtcccagctacagctactcagaaagctgaagcacgagaatcacttgaacctgggaggcggagtttgcactaagccaagatggcgccactgcactccggcctggacaacagagcaagactctgtccaaaaaaaaaaaaatgaatttgttatatgtttgtatgaaaatatcacaacaagaaaactatttagattaggttatttcatccccattccagggcaggcctaataaaactttccacagtgatggtagtatatatccataccattgagtatggtaatcatgagccacatgtggcaattctatacttaaatatgtctgttgtgacttaggaactgaattattgactttaaatttaaataaccatgtttgactaatagcttccatattggacaacacaggtctagggcatgaaaatggttaatgatgttgaggatgatactctagaatctttagacacccaacaaagaccctaagtgtagtgtatttaccatgctatatttactaaggagtttcagaatagtttttagttaagggttatgattaattcttggctaatgaaacaaagtaacctgtacacttaagtcttagtgatacttggtgttaactaatgatttttattacatcttgaaaattcagttggtatttgttaaagcgggcagtacatagctattagagagagcactcaagtagttctttggtacttccttattttcgcttttgtaaaattccttctttcctagtcctgaatcgctcttggagataaaggaaaagatgaaagcaaattatccttatagtgtaactgaagagacaatctaccatgaatcagataatttgataatattagcttaactaatataattacaaagataagtctttttaaaaaaaggccgaggcatgcagatcacccgaggtcaggagtttgagaccagcctggccaacatggtgaaaccccgtctctactaaaactacaaaattagctgggcgtggtggcgcatgcctgtaatcccagctacttgggaggctgaggcaggagaatcacttgaacccatgaggcggtggttgcaatgagccgagatcatgccactgcactccagcctgggcaaaaagagcaaaactccatttaaaaaaaaaaaagttaatacgactcatgataaacctaatattgattagcatttattgtttattccactgcctccctccattaatataaatgatcggagagctgactataataactataagctaataacttattatatatgataactataattctcagttttactatgagagtaaaaccgagaattaaaatcacacggatagtttggacgtttaaaacagtaaataacaggtgtagtttcactggataaaatccagatgagatagcttttactcatgttttccatgtgaatgatcacctctttttcttttttgagacggactctcgctctgtcacccaggctggagtgcagtgatgcaatctcagctcactgcaagctccgcctgccgggttcacgccattctcctgtctcagcctccctagtagctgagactacaggcacccgccaccatgcccggctaattttttgtatgtttagtagagacggggcttcactgtgttagccaggatggtctcgatctcctgacctcgtgatccgcctgtctcggcctcccaaagtgctaggattaaaggtgtgagccaccgcgcccggccacctcttcatttttaaaacaacattacaaggaataaaaagcatatcctgcctttctcccttcccccaaattttgtaaaaataatacagtaaacttgcagcgcagaaaatagtcaaaagaaagtaaacaactactcgtatttaaattttatagggtttagattgagataaacatgatatgaaacagcttcactggtatcagaagatagttcagattgggccgggcacggtggctcacgcctgtaatcccagcactnnnnnnnnnnnnnnnnnnnncgtgtacccagctcaacggtataaaccctccgcatgccccctatcttacaatacccctatgacagcgtcaccatggtaatgctccactaaagccagaggggacgaaataccttatctacctggaaacgccggcacctcgagaccacgagggattacttgtgactaagcggataaaatgggacagccctaggtattccggtcacctaggttcaccctcccacgttatacacgatacaaggttgaactatcacagtaattctaaaaattagccattacagaagagcaccaatattgtcacaggtacctctaaggctatatccatcttcgagcccttactagagcatctttagaaaagttcgaagtaacttacatgaaagtacagccgcagatgtgcaatcaactgatgaagcaagtgtcaggacttactgtgacaccgacgagcggctgaaaggagttattgacctgagctttgagaaggctattgatcgcgcccggccacctcttcatttttaaaacaacattacaaggaataaaaagcatatcctgcctttctcccttcccccaaattttgtaaaaataatacagtaaacttgcagcgcagaaaatagtaaaaagaaagtaaaaaactactcgtatttaaattttatagggtttagattgagataaacatgatatgaaacagcttcactggtatcagaagatagttcagattgggccgggcacggtggctcacgcctgtaatcccagcactttgggaggccaagatgagcggatcacctgaggtcaggagttcgagaccagcctggccaacatggtgaaatcccttctctacttaaaatacaaaaattagctgactgtggtggccggcgcctgtaatcccaggtacttgggaggctgaggcaggaaaattgcttcaacccaggcaggcgcctgtaatcccaggtacttgagaggctgaggcaggaaaaattgcttaaacccaggcaggcgcctataatcccaggtacttaggaggctgaggcaggaaaattgcttaaacccaggaggtagaggttgcagtgagccaagatcgcaccactgcactccagcctggggacagaacaagattgtctctcaaaaaaaaaaaaaaaaaaaaaaaaaccagaaaaaaagttcaaattgtacaaaataataggaataaaaaagaatttagactgcttcaatctttttttcctcttctttaaacaagttgttgggctgtttatactgtcaagagcaagtatggtgaattgtcattattgcttttttctgggggaattaatgcacatttattcagtcattcattattttgaaatatattcttttcctcataactacagtgtcccaaagcttatagtttattttcacctccttgcagatttgctgcggatgttttttgattgtctatatgacgaggaggtgatctccgaggatgccttctacaaatgggagagcagcaaggaccctgcagagcagaatgggaagggcgtggctctgaaatctgtcacggcattcttcacgtggctgcgggaagcagaagaggagtctgaggataactaaaacttcaaatacacaaaatgaaacaaaagaaacaatttaagtatttttttaaaaagtttcacgtcttcgccaatcacagtgcagcaaggccaattctcgcagaaacccccacgtgtgcacgagtgggagaggggaaagagaaaaaaaggtgatcatggaggaaaaaggtactggataaaagtaaacttcaaaccttagggcgggagcactaaaaccaaaatacatgtattatttatagaaaatattttctgttttaatcttttctttttaaacaaggactcatacttaaaaaaatgtttagcaaaaaaaaaaaaagttgagaacttttaatttattttaaggactgcaaatgccagtgtaattttttaatttgcagtttctgtaaacaacttgtataatagaaaagcagagaaataaatttccctccccttcaagatgcacctcatgtttgttttaaggtatagcatttagtccagatttgagaaagtttggggtgaacaaggtaagaaagatttttttttttttggcatcaaatctttctgcctgcctctcagcttgcttcagaaaatttaaaaaatcacaatagtaatcaaaacatacataacattgaaacagaaggaaatgctgtggaccacagaactccaagaattgtttaaaaaaaaaaaagtgctaccctgagaaaagtactcttaatactcttgaaatctttagagcaactttaaggcttgtaaatacatagaacaaatatttaaaaaaacaaaaagaaattgactcagtactatttcttttcactttgaaaatataaagaacaaaataaagacaaacattgcaagtttaaaagaaagtaaagtgacttctcctttggacagctgctgcatgtgtgcccattcctgggggtgctgtctggctatttattgtctaattcaaatcactcctgaggggagagagataaaacgagagagagtgagagagtgtgtgtatgtgcgtgtatgcgcacgtatgtgcatgcacatgtatgtatgtatatgtctctactcactgaaaaggcaagctactttgtgggtaaggagggcacttgtgcttgggtgggaatgccccactgggagtccagtgaaacttgtttccaacactaactaaaaatgcattcaggacagtaggcctcaagggcagtcctttagataactaagttttccactctgtgtatcaggactcaggacaataattcactttgagactgccactaccactgattttaaaatcttccatcaattgcctgcaatgcttaagaaacccaaagatgtcctctaaagaatgaataaaaccaaaagctatattatgcttttacaaaagtgggggtgggatttttataaaagtgggggtggggtttaaaatcaagccaataccatgtatgcaaatcacattgtctgccaactccaacctcattcaagccattctggtgagtataaagctgactgtgggcctctgcttgggcctctgcttctcctacagatattggagtgctgtgctttctaattttcccaccctttcatgaagtcgcagtctctacagatggttttccatttcagttgtttgtgggccatcaacctacaaaatgtatttatgaagaaagccagactactcccagataaatagtctttttcttttgtatctggataacaagagatttctgctggcttccatctctgaagaaataccacattaagagacttggcaagacttgtgaaacacaagaacaaaattttctatagcaataaaatgtttctctgaagtgtagttgaacacaatacaagatcccactacataagcccacagaggccatttttcagtggtggaatgctgtatgccactggtccccaatgcacaacctagatccctcacatgtgcagttcacaatgggttcgcgctcctgtgagaatctaatgccaccactgatctgacaggaggcggagctcaggtggaaatgcttgctcacacaccactcaccttctgttgtgcagcccagtttctaacaggccatggaccagtacgtgtccttggcccaggggctggggacccctgctgtatgctgcttttgttttgttttgagacagggtgttgctctgtcacccaggttggagtgcagtggcttgatcatggctcactgtagcctcaaactcctgggctcaagcgatcctcctgcctcaccctccccagtagctgggactacaggcacacaccaccacagaatactattgttgaaggaccaagtcctgaaagtcttttgaagggtatgcgacagcatcagctgtaaaagatggggcctgaaaagctgttttggagcctgaccacaggctttgcctgggatccctcaattgggagaagcagcctggttctatgatcaactgagtaaacaacctccagaatcaaagtgcagaggattatgatcaaggaatcgtctctgagtgatagaagtttttagaaggtattgacagcactcaagaggttgagggaggggagtttaggggaatacaggatggtaactgcctcttgagaatcagtagctgttttttgcaggggtctgaccagggagggatttcaggtagtagagatggcctagttatcagtattttacatattaacaagtgtaaggaatggaggaaagagagaaatatttttgaaagaacaattaaagggttgaaaaatatcttaagatataaacatctctagtacaatgacagaaataatgtttgaaatcttacctataacatgaagtatgttgaagagactacaaagtaagctttgagtatcttgttgctgtggacacggaatgtgtgctaggattagaagttgcctaatgacaaaatatgagcaaagtaagataattgccccctactaatatccactgaactgcaaaacagtgtcaagattattaccctctctagtctttttactggaaaatagggtttggcaatttttgttttaatataataggtgacattgccaacattgatatgccagcactcctttgagctgtagcaaaagctccttcaccgatttcaaatttgggagcaggtccaatgcctttttttttttttttttttttgagatggagtctggctctgttgcccaggctggagtgcagtggcgtgatctctactcactgcaaactccgcctcccaggttcaagcagttctgcctcagcctcccgagtagctgggattataggaagcgccaccacgcccggctaatttttttgtattttaagtagagatggggtttcaccatatttgttttgccaggctggtcttgaactcccaactccaggtgaaccgcccacctcggcctcccaaagtgctgggattacaggcatgagccaccgcacctggcccaatacctcttttagtgcatttattaaggtgcttatacctattttctaaccagtcaacttatggctattcagtaaatgaacattttttcatttctaacaaaggaaaatgatactaattttcaaaatgaacttattttgggttcttgtgtaggccaataagctagcccataactgcatcatgagcttgttttgttcaaccaatatttaactcaacatctactgtgcactaagtggagataggataacagtgaccacagtaggctctgctttcatggatctcatattcttcatgaaaacagaaagctagaggtcgttaacatgctgcatcagcatcgcatcccactaagaagtatctgctccttattactttggcagatctttgtttgttttttctttatatttcaaaattcattctaggctgtttgcaacaattaaatccaaagatagctttaaaaccactctccaaacaagttattttggagtttttgacatactatcttgtttcaaatggctctttttaagtcaatagaattctaagttggttggggaaagatcctaggctactgtatctaattctgttttcatcactcaagttttattatttaaaaaaaaaatagaggaatccagtttttcaatttcaactatgtcattagcatgtacttccatattctccattttgtagggagtaacattttacattactttttgtttgctttttcttttcttgagacagtcttgatctgtcgcccaggcgggagttcagtggtgtgatcttggctcactgcagcctccacctcccaggttcaagtgattctcctgcctcagcctcccgagtagctgggattacaggctcaggccaggtagggagggatatgctacatgcccactggcataaaatatcccatatgtccctcaaaaggaaaaatgatcatctgttagtttggggacttaaaaaaaaaacctgacatcactgtgtattaccaaatcatgagatgatttatacattaagctacagagaatcatatgccaaatgttattcagttaaagttttattttgaaataatttcagacttacagaaaagttgcagattttacagaaagttctatatacccctcatccagttccctttataataacatcttatattgccataggacatttgtcaaaactaagaaaccagctttggtatgttgcttgtaactaaacttaagagtatttagattttcaccaatgtcccttttctggtccaagatgcagtccatgatactacattgcatctaaggaatcatttccttagtgtcctctggactttgacagttttttggtctttttcatgactttgacaattttgaggagtaataatgggacattttgtagaatgtctgtcaatttgtatttgtctggtgtttttctcatgattaaagtggggttatgtattttggataaaaataactgtatattgtaatcccagctctttgggagaccaaggcaggaggattacttgaagctaggagtttgagaccagcctgggcaatataggaagacccccccatctctacaaaaatacttaaaaattagccaggcatggtgatgcacacctgtagtcccagctgctcaggaagctaaggcaggagaatcacttgagcccaggagatcaaggctgcagtgagctatgatcatgccactgcatttcagcttgggcagcagaatgagaccctgtctctaaaaaataaaaacacaaataccatataaatgaagttctcttctcatatatcagcaggtacaagatactcacatgataactttatttggctaagttggtgtttgccaggtttctctatagttacttttctttcccccctttcttactctagtctatatgaaagccagtcactaaatccaacccacacttgggaagagagatgggagtaggagagaattaagctttacttcctttctagagtgggaagcgtctacttaaattatttggaattttcccacaaggaagatgtctctcttctctatttgtttgtttagtcactcatatgtatttatatgtgtgtatgtataaatgtacacacatgggtatgtatatatcagtatgggctcatgtatatttcatactttgaattataacccaatagtacatgattttgttgttcacattgttccagctttagccattaggggctctttcaagttggcttatgtgtcccttgacattccctgatacttttgtttttagagcacgtactttctgccatcacaagatgccacagacatatcttgtattttccctgcctcagtcctagaatcagccatttctacaagaatccctggtttcttctaggagaatgggatttagaaaccaagcttttactcactgggtttgcatgttgctattggggcatctcagcctcttggtctgccaacattttaaacttcattttcttgccaggcgagtaagctgctttcacatggagcactatgaccattagaaaacatagttctgggctgggcgcagtggctcacccctgtaatcccagcactttgggaggccacaataggcggatcatgaggtcaggagatcgagaccatcctggccaacatgccgaaacaccgtctctactaaaaatacaaaaattactgtgcatggtagcgcgtgcctgtaatcccagctacttgggaggctgaggcaggagaatcgcttgaaccagggagtcgaaggtttcagtgagccaagatcacgccacagcactccagcctgacgacagagcaagactctgtctcaaaaaaaaaaaaagaaaacatagttctggtgtgtgtgtgtgtgtgtgtattactttgggccaagcgcagtggctcacacctgtaatcctagcactttgggaggccgaggtgggtagatgacttgaggtcaggagtttgagaccagcttgtgcaacatggtaaaaccccatctctactaaaaacatacaaaattagccaggtgtggtggtgggcacctgtagtcccagatactcgggagactgaggcaggagaactgcttgaccccgggaggcagaggttgcaatgagccaagatcccaccattgccctccagcctgggtaacagcaagactgtctaaaatataataataataaaataaaacactctggtacccaaaagactcaagcctatagatacttcattcattttctgctcatcttacataggaaaaagtagagggccaggtactgtggctcacggctataatcccagcacttcgggaggccaaggtggccagatcacttgaggccaggagttcaagaccagtctggccaacatggcaagactctctctctactaaaaaatacaaaaattagttgggcctggtggcgcatgcctgtaatcccagctactcagaaggttgaggcacgagaatcacttgaacctgggaggcggaggttgcagtgaaccaagatagggtcactgcactccagcctgggtgacagagtgagactctctcaaataaataaatcaataaatattgaactgtttctctctttccccattatgattatttgttttaatttcccttagctagtaatatttagagtctactaaggtaccaatacagagcagtgttaaaatgttaactcagttaaacaataataatggaaatcgcgaaataatgaaaagttaactgatgataaaagcgctgcgtatcaaaacttgagataaacctaaagtaagcccaagagttcgaggttacagtgagctttgattgtgccactgcactccagcctgggtgacaagagttaagaccctgtctcttaaagcaaaaaagctgagtaatacttttaggtaaatgtaaagtctttaaatacatttgtttagaaaccataccagtttaaagtaaatgaattagggtatcagaagaaccaactgggggcagggggatgccacctaagtgaatatcaagagtttactcttccttctataggaagaagttgtgtgctgagaggaaggaggtatagactagaattgggagatctgtgctctaatgctaacattgctgttcacggaatatttgaccacctgcttggtatgggccttcctctcttctctagaaagggcttactcttgccaaccatatgagcacatccagaatcactttaaatactgcctaccaagcttaacaaagacaaaaggttttggtaataataggatattaccagcttttcaatgaagtaaaaatatcaagaatttctgaaatttcaagtcaccatgagttgaacttgtactatcagtattccttttcaatccttctgtcatatttacctcttattggtaaatacatgtcctctgacctgaagtcctgggaaactatctttgccaaatttcaaaaagccaccctgccatagcttcttcctacattgtagaataaatagtgctcaacactggctgtgtgttagaagtacctggaaagcttttaaaaatacaaatcctggagccccacctcagactaattatttcaggatctctggggatgagacctgggcatctctctctctctctctctcattttttaaatttaaattccttaggtgatcataatatgacccagggttgagacgacactgaaatggtgaaaataacctgattcagctaacaatatagataacaatttatattttcaggtatttcagaaatatattttaactgcaagatgttggacaaacaaatggacttacatatggcacatactttgaaaatacagtgttaggagagcatataatggggaccctgtatacactgggggattagggaatgttgcccttaggagtagaattttaaacaaaaatgtgaagaatcaaatagttaaggggtctgttgaaatagaggagatcttgtgtgcaaagtccatggttgggggaacgcatggtgtatttgagaatgaagaaagggtgacagtatggcgagagttcattctcacatgcaaaagtcaaatctgaacgtgcccagtgacaaattaatccagacaaactttttctggacaaatagagggaaagaaccttttttttttttttttttttttttttttttttgacagagtcttgctctatcacccaggctggagtgcgatggcacaatctcagctcattgcaacctccacctcccggattcaagcgattctcttgcctcagcctcccaagtagctgggactacaggcatgcaccatcacacccggctagtttttgtatttttagtagagacggggttttaccatttgaccaggctagtctcgagctcctgacctcaggtgatccacctgccttggccttccatagtgctgagattacggcatgagccactgcgcccagccatggaaagaacttttgaaagctgccttatactttcacttagcagaattcactagagatgaactttagttggtttttttaatagttactcagcaaaaagaataacgatgctttcaatcatttccaattcgcaattagccacacagcatgttagaataactgtaggctctttggagtaactagttatatctaacctcagggttagtcaaagtatgggccttggactagcagcatcaacatcacctgtgagcttcttagaatgcaaattcacaggccccagcctactaaaaccgaatctgaagagatggaagatcccaagaaatcgctataagcgcttcagatgatttttaggcacactgaagtttaagaaccactgcctaggagtatttcacatctctgccagagtatagtcctcttcaaaaagctaacacaaaacaagttgtatgctgcttttagaacctttcggcttgtactttcgcatctacaacacagaaacaataagcccttcctgatttccttagtaaactaatagtaaattaatttcctaggcaatgcaggatggcatctaattggtcttcatactaggcttctgacatgtaaggtggtgctgcttccttttaccaggtagggaactgagtaacacagaagtcatgtacctagcaagtgtcagaagcaagactggcacttggttttctgggaggcagtattgtccgaaaaataactctcaccaccaagagttttcttttggggaaaatgacgtagtggatgtagtttggaatattggcattggaaaaataggagcattagtatagccctgctggggttgctgaaacctcggcttccatttatttatttatttttttatgagacagggtctcactgtcgcccaggcagtagcttagtgctgtgatctcggctcattgcaacctgtctcctgggctcaagggagcctccagagtagctgggactgtggctaattcttgtattttttgtagagatgggttttcaccatgttgcccaggctggttttgaacacctgagctcaagccatcaacccaccttagcctcccaaagtgctggggtcgcaggcatgagttactgcgcccggccagttgcctcatctataaaacaaaagtaacatccacttcatggggttgtcttgaggaattaaaggagatcggataaagtgcccagcattctgcctgaaatacctagggcccttcctgtctgcgtccagtgttctttttctgccacactcttactaccttagtcataatcagttacatacagttaggctatgccattttcagaactgtaggagattatagcttacctatccacatttctttctttttttttttttttgagacggagtctcactctgtcacccaggctggggtgcagtggtgtgatcttggctcagtgcagcctccacctccggagttcaagcgattctcctgcctcagcctcccaagtagctgggactacaggcatgcgccaccacgcctggctaatttttttgtattttcagtagagatggggtttcatcatgttggccaggctggtctcgaactcctgacctcaggtgatctgcccgcctcagcctcccaaagtgctgggattacaggcgtgagccaccgtgcccagcccacatttatttaatattctattgatcaaatttttaaaattgttttactttccctagaaaatactatgaagtctttttttttttttttttttttttttttttttgagacggagtctcgctctgttgcccaggctggaattcagtggcaccatctcggctcactgcaagctccgcctcccaggttcacgccattctcccgcctcagccttccgagtagctgggactacagacgcccgccaccatacccggctaatttttttgtatttttagtagagatggggtttcacctatcatgttagccaggatggtctcaatcttctgacctcgtgatctgcccgccttggcctcccaaagtgctgggattacaggcgtgaaccaccgtgcccggcaatactatgaagtcttaagtgtctatccctactgctaacagacctgggaatagaggc

SEQ ID NO: 938 - DNA, 5863 bp, Homo sapiens
caatcccacagagtattgatgaggaaactgaagtttggagcgatcacatcattttcccaaggtaacacaagtggcaagacagccgggaacccctaccccatccccttattcagcacatgaaataaacaaggggcatccaaatcttgcggcaacgcccccgggacatgcatcgtcccctggactctctcaaaccccttatccctctggacagaatgcaggtccaaccacgctggtataccctcaaacccctcagacaatgaattcacaacctcaaacccgttctccgtttttccagaggcctcaaatacagcctcctagagctaccatcccgaacagcagtccttccattcgtcctggtgcacagacacccactgcagtgtaccaggctaatcagcacatcatgatggttaaccatctgcccatgccgtacccagtgccccaggggcctcagtactgtataccacagtaccgtcatagtggccctccttatgttgggcccccccaacaatatccagttcaaccaccggggccaggtcctttttatcctggaccaggacctggggacttccccaatgcttatggaacgcctttttacccaagtcagccggtgtatcagtcagcacctatcatagtgcctacgcagcaacagccgcctccagccaagagagagaaaaaaactataagaattcgggatccaaaccagggaggtaaagacataacagaggagattatgtctggaggtggcagcagaaatcctactccacccataggaagacccacgtccacacctactcctcctcagcagctgcccagccaggtccccgagcacagccctgtggtttatgggactgtggagagcgctcatcttgctgccagcacccctgtcactgcagctagcgaccagaagcaagaggagaagccaaaaccagatccagtgttaaagtctccttccccagtccttaggctagtcctcagtggagagaagaaagaacaagaaggccagacatctgaaactactgcaatagtatccatagcagagcttcctctgcctccatcacctaccactgtttcttctgttgctcgaagtacaattgcagcccccacctcttctgctcttagtagccaaccaatattcaccactgctatagatgacagatgtgaactctcatccccaagagaagacacaattcctatacccagcctcacatcttgcacagaaacatcagaccctttaccaacaaatgaaaatgatgatgatatatgcaagaaaccctgtagtgtagcacctaatgatattccactggtttctagtactaacctaattaatgaaataaatggagttagcgaaaaattatcagccacggagagcattgtggaaatagtaaaacaggaagtattgccattgactcttgaattggagattctcgaaaatcccccagaagaaatgaaactggagtgtatcccagctcccatcaccccttccacagttccttcctttcctccaactcctccaactcctccagcttctcctcctcacactccagtcattgttcctgctgctgccactactgttagttctccgagtgctgccatcacagtccagagagtcctagaggaggacgagagcataagaacttgccttagtgaagatgcaaaagagattcagaacaaaatagaggtagaagcagatgggcaaacagaagagattttggattctcaaaacttaaattcaagaaggagccctgtcccagctcaaatagctataactgtaccaaagacatggaagaaaccaaaagatcggacccgaaccactgaagagatgttagaggcagaattggagcttaaagctgaagaggagctttccattgacaaagtacttgaatctgaacaagataaaatgagccaggggtttcatcctgaaagagacccctctgacctaaaaaaagtgaaagctgtggaagaaaatggagaagaagctgagccagtacgtaatggtgctgagagtgtttctgagggtgaaggaatagatgctaattcaggctccacagatagttctggtgatggggttacatttccatttaaaccagaatcctggaagcctactgatactgaaggtaagaagcagtatgacagggagtttctgctggacttccagttcatgcctgcctgtatacaaaaaccagagggcctgcctcctatcagtgatgtggttcttgacaagatcaaccaacccaaattgccaatgcgaactctggatcctcgaattttgcctcgaggaccagactttacaccagcctttgctgattttggaaggcagacacctggtggaagaggcgtacctttgttgaatgttgggtcacgaagatctcaacctggccaaagaagagaacccagaaagatcatcacagtttctgtaaaagaagatgtacacctgaaaaaggcagaaaatgcctggaagccaagccaaaaacgagacagccaagccgatgatcccgaaaacattaaaacccaggagctttttagaaaagttcgaagtatcttaaataaattgacaccacagatgttcaatcaactgatgaagcaagtgtcaggacttactgttgacacagaggagcggctgaaaggagttattgacctggtctttgagaaggctattgatgaacccagtttctctgtggcttacgcaaacatgtgtcgatgtctagtaacgctgaaagtacccatggcagacaagcctggtaacacagtgaatttccggaagctgctactgaaccgttgccagaaggagtttgaaaaagataaagcagatgatgatgtctttgagaagaagcagaaagaacttgaggctgccagtgctccagaggagaggacaaggcttcatgatgaactggaagaagccaaggacaaagcccggcggagatccattggcaacatcaagtttattggagaactctttaaactcaaaatgctgactgaagccatcatgcatgactgtgtggtgaagctgctaaagaaccatgatgaagaatccctggagtgcctgtgtcgcctgctcaccaccattggcaaagacttggactttgaaaaagcaaagccacgtatggaccagtactttaatcagatggagaaaattgtgaaagaaagaaaaacctcatctaggattcggttcatgcttcaagatgttatagacctaaggctgtgcaattgggtatctcgaagagcagatcaagggcctaaaactatcgaacagattcacaaagaggctaaaatagaagaacaagaagagcaaaggaaggtccagcaactcatgaccaaagagaagagaagaccaggtgtccagagagtggacgaaggtgggtggaacactgtacaaggggccaagaacagtcgggtactggacccctcaaaattcctaaaaatcactaagcctacaattgatgaaaaaattcagctggtacctaaagcacagctaggcagctggggaaaaggcagcagtggtggagcaaaggcaagtgagactgatgccttacggtcaagtgcttccagtttaaacagattctctgccctgcaacctccagcaccctcagggtccacgccatccacgcctgtagagtttgattcccgaaggaccttaactagtcgtggaagtatgggcagggagaagaatgacaagccccttccatctgcaacagctcggccaaatactttcatgaggggtggcagcagtaaagacctgctagacaatcagtctcaagaagagcagcggagagagatgctggagaccgtgaagcagctcacaggaggtgtggatgtggagaggaacagcactgaggctgagcgaaataaaacaagggagtcagcaaaaccagaaatttcagcaatgtcagctcatgacaaggctgcattatcagaagaggaactggagaggaagtcgaaatctatcattgatgaatttctacacattaatgattttaaggaagccatgcagtgtgtggaagagctgaatgcccagggcctactacatgtttttgtgagagtgggagtggagtccaccctggaaaggagccagatcaccagggatcacatgggccaactactctatcagctggtacagtcagaaaaactcagcaaacaggactttttcaaaggtttttcagaaactttggaattggcagatgacatggccattgatattccccatatttggttgtaccttgctgaactggtgacccccatgttaaaagaaggtggaatctccatgagagaacttaccatagaatttagcaaacctttacttcctgttggaagagctggggtcttgctatctgaaatattgcacctactatgcaaacaaatgagccataagaaagtgggagccttatggagggaggctgacctcagctggaaggactttttaccagaaggagaagatgtacataattttcttttggagcagaagttggacttcatagagtctgacagtccctgttcctctgaagcactttcaaagaaagaactgtctgccgaagagctgtataagcgactcgagaaactcattattgaggacaaagcgaatgatgaacagatctttgactgggtagaggctaatctagacgaaatccagatgagttcacctacattccttagagctttaatgactgctgtttgtaaagcagctattatagccgactcttctaccttcagagtggacactgctgttatcaagcagagagtgccgatcttactcaagtacctagactcagatacagagaaggaactgcaagcactttatgcactacaagcatcgatagtaaaacttgatcaacctgccaatttgctgcggatgttttttgattgtctatatgacgaggaggtgatctccgaggatgccttctacaaatgggagagcagcaaggaccctgcagagcagaatgggaagggcgtggctctgaaatctgtcacggcattcttcacgtggctgcgggaagcagaagaggagtctgaggataactaaaacttcaaatacacaaaatgaaacaaaagaaacaatttaagtatttttttaaaaagtttcacgtcttcgccaatcacagtgcagcaaggccaattctcgcagaaacccccacgtgtgcacgagtgggagaggggaaagagaaaaaaaggtgatcatggaggaaaaaggtactggataaaagtaaacttcaaaccttagggcgggagcactaaaaccaaaatacatgtattatttatagaaaatattttctgttttaatcttttctttttaaacaaggactcatacttaaaaaaatgtttagcaaaaaaaaaaaaagttgagaacttttaatttattttaaggactgcaaatgccagtgtaattttttaatttgcagtttctgtaaacaacttgtataatagaaaagcagagaaataaatttccctccccttcaagatgcacctcatgtttgttttaaggtatagcatttagtccagatttgagaaagtttggggtgaacaaggtaagaaagatttttttttttttggcatcaaatctttctgcctgcctctcagcttgcttcagaaaatttaaaaaatcacaatagtaatcaaaacatacataacattgaaacagaaggaaatgctgtggaccacagaactccaagaattgtttaaaaaaaaaaaagtgctaccctgagaaaagtactcttaatactcttgaaatctttagagcaactttaaggcttgtaaatacatagaacaaatatttaaaaaaacaaaaagaaattgactcagtactatttcttttcactttgaaaatataaagaacaaaataaagacaaacattgcaagtttaaaagaaagtaaa

SEQ ID NO: 939 - protein, 1579 aa, Homo sapiens
MNSQPQTRSPFFQRPQIQPPRATIPNSSPSIRPGAQTPTAVYQANQHIMMVNHLPMPYPVPQGPQYCIPQYRHSGPPYVGPPQQYPVQPPGPGPFYPGPGPGDFPNAYGTPFYPSQPVYQSAPIIVPTQQQPPPAKREKKTIRIRDPNQGGKDITEEIMSGGGSRNPTPPIGRPTSTPTPPQQLPSQVPEHSPVVYGTVESAHLAASTPVTAASDQKQEEKPKPDPVLKSPSPVLRLVLSGEKKEQEGQTSETTAIVSIAELPLPPSPTTVSSVARSTIAAPTSSALSSQPIFTTAIDDRCELSSPREDTIPIPSLTSCTETSDPLPTNENDDDICKKPCSVAPNDIPLVSSTNLINEINGVSEKLSATESIVEIVKQEVLPLTLELEINPPEEMKLECIPAPITPSTVPSFPPTPPTPPDPHTPVIVPAAATTVSSPSAAITVQRVLEEDESIRTCLSEDAKEIQNKIEVEADGQTEEILDSQNLNSRRSPVPAQIAITVPKTWKKPKDRTRTTEEMLEAELELKAEEELSIDKVLESEQDKMSQGFHPERDPSDLKKVKAVEENGEEAEPVRNGAESVSEGEGIDANSGSTDSSGDGVTFPFKPESWKPTDTEGKKQYDREFLLDFQFMPACIQKPEGLPPISDVVLDKINQPKLPMRTLDPRILPRGPDFTPAFADFGRQTPGGRGVPLLNVGSRRSQPGQRREPRKIITVSVKEDVHLKKAENAWKPSQKRDSQADDPENIKTQELFRKVRSILNKLTPQMFNQLMKQVSGLTVDTEERLKGVIDLVFEKAIDEPSFSVAYANMCRCLVTLKVPMADKPGNTVNFRKLLLNRCQKEFEKDKADDDVFEKKQKELEAASAPEERTRLHDELEEAKDKARRRSIGNIKFIGELFKLKMLTEAIMHDCVVKLLKNHDEESLECLCRLLTTIGKDLDFEKAKPRMDQYFNQMEKIVKERKTSSRIRFMLQDVIDLRLCNWVSRRADQGPKTIEQIHKEAKIEEQEEQRKVQQLMTKEKRRPGVQRVDEGGWNTVQGAKNSRVLDPSKFLKITKPTIDEKIQLVPKAQLGSWGKGSSGGAKASETDALRSSASSLNRFSALQPPAPSGSTPSTPVEFDSRRTLTSRGSMGREKNDKPLPSATARPNTFMRGGSSKDLLDNQSQEEQRREMLETVKQLTGGVDVERNSTEAERNKTRESAKPEISAMSAHDKAALSEEELERKSKSIIDEFLHINDFKEAMQCVEELNAQGLLHVFVRVGVESTLERSQITRDHMGQLLYQLVQSEKLSKQDFFKGFSETLELADDMAIDIPHIWLYLAELVTPMLKEGGISMRELTIEFSKPLLPVGRAGVLLSEILHLLCKQMSHKKVGALWREADLSWKDFLPEGEDVHNFLLEQKLDFIESDSPCSSEALSKKELSAEELYKRLEKLIIEDKANDEQIFDWVEANLDEIQMSSPTFLRALMTAVCKAAIIADSSTFRVDTAVIKQRVPILLKYLDSDTEKELQALYALQASIVKLDQPANLLRMFFDCLYDEEVISEDAFYKWESSKDPAEQNGKGVKSVTAFFTWLREAEEESEDN

SEQ ID NO: 940 - DNA, 5860 bp, Homo sapiens
ggcggcggcggcagcggtcccccctcctcacccgaacatcagggccctccagactcaggcgccccaacaaattcctagaggacctgtgcaacaacctcttgaggatcgaatcttcactcccgctgtctcagcagtctacagcacggtaacacaagtggcaagacagccgggaacccctaccccatccccttattcagcacatgaaataaacaaggggcatccaaatcttgcggcaacgcccccgggacatgcatcgtcccctggactctctcaaaccccttatccctctggacagaatgcaggtccaaccacgctggtataccctcaaacccctcagacaatgaattcacaacctcaaacccgttctccgtttttccagaggcctcaaatacagcctcctagagctaccatcccgaacagcagtccttccattcgtcctggtgcacagacacccactgcagtgtaccaggctaatcagcacatcatgatggttaaccatctgcccatgccgtacccagtgccccaggggcctcagtactgtataccacagtaccgtcatagtggccctccttatgttgggcccccccaacaatatccagttcaaccaccggggccaggtcctttttatcctggaccaggacctggggacttccccaatgcttatggaacgcctttttacccaagtcagccggtgtatcagtcagcacctatcatagtgcctacgcagcaacagccgcctccagccaagagagagaaaaaaactataagaattcgggatccaaaccagggaggtaaagacataacagaggagattatgtctggaggtggcagcagaaatcctactccacccataggaagacccacgtccacacctactcctcctcagcagctgcccagccaggtccccgagcacagccctgtggtttatgggactgtggagagcgctcatcttgctgccagcacccctgtcactgcagctagcgaccagaagcaagaggagaagccaaaaccagatccagtgttaaagtctccttccccagtccttaggctagtcctcagtggagagaagaaagaacaagaaggccagacatctgaaactactgcaatagtatccatagcagagcttcctctgcctccatcacctaccactgtttcttctgttgctcgaagtacaattgcagcccccacctcttctgctcttagtagccaaccaatattcaccactgctatagatgacagatgtgaactctcatccccaagagaagacacaattcctatacccagcctcacatcttgcacagaaacatcagaccctttaccaacaaatgaaaatgatgatgatatatgcaagaaaccctgtagtgtagcacctaatgatattccactggtttctagtactaacctaattaatgaaataaatggagttagcgaaaaattatcagccacggagagcattgtggaaatagtaaaacaggaagtattgccattgactcttgaattggagattctcgaaaatcccccagaagaaatgaaactggagttcattgttcctgctgctgccactactgttagttctccgagtgctgccatcacagtccagagagtcctagaggaggacgagagcataagaacttgccttagtgaagatgcaaaagagattcagaacaaaatagaggtagaagcagatgggcaaacagaagagattttggattctcaaaacttaaattcaagaaggagccctgtcccagctcaaatagctataactgtaccaaagacatggaagaaaccaaaagatcggacccgaaccactgaagagatgttagaggcagaattggagcttaaagctgaagaggagctttccattgacaaagtacttgaatctgaacaagataaaatgagccaggggtttcatcctgaaagagacccctctgacctaaaaaaagtgaaagctgtggaagaaaatggagaagaagctgagccagtacgtaatggtgctgagagtgtttctgagggtgaaggaatagatgctaattcaggctccacagatagttctggtgatggggttacatttccatttaaaccagaatcctggaagcctactgatactgaaggtaagaagcagtatgacagggagtttctgctggacttccagttcatgcctgcctgtatacaaaaaccagagggcctgcctcctatcagtgatgtggttcttgacaagatcaaccaacccaaattgccaatgcgaactctggatcctcgaattttgcctcgaggaccagactttacaccagcctttgctgattttggaaggcagacacctggtggaagaggcgtacctttgttgaatgttgggtcacgaagatctcaacctggccaaagaagagaacccagaaagatcatcacagtttctgtaaaagaagatgtacacctgaaaaaggcagaaaatgcctggaagccaagccaaaaacgagacagccaagccgatgatcccgaaaacattaaaacccaggagctttttagaaaagttcgaagtatcttaaataaattgacaccacagatgttcaatcaactgatgaagcaagtgtcaggacttactgttgacacagaggagcggctgaaaggagttattgacctggtctttgagaaggctattgatgaacccagtttctctgtggcttacgcaaacatgtgtcgatgtctagtaacgctgaaagtacccatggcagacaagcctggtaacacagtgaatttccggaagctgctactgaaccgttgccagaaggagtttgaaaaagataaagcagatgatgatgtctttgagaagaagcagaaagaacttgaggctgccagtgctccagaggagaggacaaggcttcatgatgaactggaagaagccaaggacaaagcccggcggagatccattggcaacatcaagtttattggagaactctttaaactcaaaatgctgactgaagccatcatgcatgactgtgtggtgaagctgctaaagaaccatgatgaagaatccctggagtgcctgtgtcgcctgctcaccaccattggcaaagacttggactttgaaaaagcaaagccacgtatggaccagtactttaatcagatggagaaaattgtgaaagaaagaaaaacctcatctaggattcggttcatgcttcaagatgttatagacctaaggctgtgcaattgggtatctcgaagagcagatcaagggcctaaaactatcgaacagattcacaaagaggctaaaatagaagaacaagaagagcaaaggaaggtccagcaactcatgaccaaagagaagagaagaccaggtgtccagagagtggacgaaggtgggtggaacactgtacaaggggccaagaacagtcgggtactggacccctcaaaattcctaaaaatcactaagcctacaattgatgaaaaaattcagctggtacctaaagcacagctaggcagctggggaaaaggcagcagtggtggagcaaaggcaagtgagactgatgccttacggtcaagtgcttccagtttaaacagattctctgccctgcaacctccagcaccctcagggtccacgccatccacgcctgtagagtttgattcccgaaggaccttaactagtcgtggaagtatgggcagggagaagaatgacaagccccttccatctgcaacagctcggccaaatactttcatgaggggtggcagcagtaaagacctgctagacaatcagtctcaagaagagcagcggagagagatgctggagaccgtgaagcagctcacaggaggtgtggatgtggagaggaacagcactgaggctgagcgaaataaaacaagggagtcagcaaaaccagaaatttcagcaatgtcagctcatgacaaggctgcattatcagaagaggaactggagaggaagtcgaaatctatcattgatgaatttctacacattaatgattttaaggaagccatgcagtgtgtggaagagctgaatgcccagggcctactacatgtttttgtgagagtgggagtggagtccaccctggaaaggagccagatcaccagggatcacatgggccaactactctatcagctggtacagtcagaaaaactcagcaaacaggactttttcaaaggtttttcagaaactttggaattggcagatgacatggccattgatattccccatatttggttgtaccttgctgaactggtgacccccatgttaaaagaaggtggaatctccatgagagaacttaccatagaatttagcaaacctttacttcctgttggaagagctggggtcttgctatctgaaatattgcacctactatgcaaacaaatgagccataagaaagtgggagccttatggagggaggctgacctcagctggaaggactttttaccagaaggagaagatgtacataattttcttttggagcagaagttggacttcatagagtctgacagtccctgttcctctgaagcactttcaaagaaagaactgtctgccgaagagctgtataagcgactcgagaaactcattattgaggacaaagcgaatgatgaacagatctttgactgggtagaggctaatctagacgaaatccagatgagttcacctacattccttagagctttaatgactgctgtttgtaaagcagctattatagccgactcttctaccttcagagtggacactgctgttatcaagcagagagtgccgatcttactcaagtacctagactcagatacagagaaggaactgcaagcactttatgcactacaagcatcgatagtaaaacttgatcaacctgccaatttgctgcggatgttttttgattgtctatatgacgaggaggtgatctccgaggatgccttctacaaatgggagagcagcaaggaccctgcagagcagaatgggaagggcgtggctctgaaatctgtcacggcattcttcacgtggctgcgggaagcagaagaggagtctgaggataactaaaacttcaaatacacaaaatgaaacaaaagaaacaatttaagtatttttttaaaaagtttcacgtcttcgccaatcacagtgcagcaaggccaattctcgcagaaacccccacgtgtgcacgagtgggagaggggaaagagaaaaaaaggtgatcatggaggaaaaaggtactggataaaagtaaacttcaaaccttagggcgggagcactaaaaccaaaatacatgtattatttatagaaaatattttctgttttaatcttttctttttaaacaaggactcatacttaaaaaaatgtttagcaaaaaaaaaaaaagttgagaacttttaatttattttaaggactgcaaatgccagtgtaattttttaatttgcagtttctgtaaacaacttgtataatagaaaagcagagaaataaatttccctccccttcaagatgcacctcatgtttgttttaaggtatagcatttagtccagatttgagaaagtttggggtgaacaaggtaagaaagatttttttttttttggcatcaaatctttctgcctgcctctcagcttgcttcagaaaatttaaaaaatcacaatagtaatcaaaacatacataacattgaaacagaaggaaatgctgtggaccacagaactccaagaattgtttaaaaaaaaaaaagtgctaccctgagaaaagtactcttaatactcttgaaatctttagagcaactttaaggcttgtaaatacatagaacaaatatttaaaaaaacaaaaagaaattgactcagtactatttcttttcactttgaaaatataaagaacaaaataaagacaaacattgcaagtttaaaagaaagtaaa

SEQ ID NO: 941 - protein, 1552 aa, Homo sapiens
MNSQPQTRSPFFQRPQIQPPRATIPNSSPSIRPGAQTPTAVYQANQHIMMVNHLPMPYPVPQGPQYCIPQYRHSGPPYVGPPQQYPVQPPGPGPFYPGPGPGDFPNAYGTPFYPSQPVYQSAPIIVPTQQQPPPAKREKKTIRIRDPNQGGKDITEEIMSGGGSRNPTPPIGRPTSTPTPPQQLPSQVPEHSPVVYGTVESAHLAASTPVTAASDQKQEEKPKPDPVLKSPSPVLRLVLSGEKKEQEGQTSETTAIVSIAELPLPPSPTTVSSVARSTIAAPTSSALSSQPIFTTAIDDRCELSSPREDTIPIPSLTSCTETSDPLPTNENDDDICKKPCSVAPNDIPLVSSTNLINEINGVSEKLSATESIVEIVKQEVLPLTLELEINPPEEMKLEFIVPAAATTVSSPSAAITVQRVLEEDESIRTCLSEDAKEIQNKIEVEADGQTEEILDSQNLNSRRSPVPAQIAITVPKTWKKPKDRTRTTEEMLEAELELKAEEELSIDKVLESEQDKMSQGFHPERDPSDLKKVKAVEENGEEAEPVRNGAESVSEGEGIDANSGSTDSSGDGVTFPFKPESWKPTDTEGKKQYDREFLLDFQFMPACIQKPEGLPPISDVVLDKINQPKLPMRTLDPRILPRGPDFTPAFADFGRQTPGGRGVPLLNVGSRRSQPGQRREPRKIITVSVKEDVHLKKAENAWKPSQKRDSQADDPENIKTQELFRKVRSILNKLTPQMFNQLMKQVSGLTVDTEERLKGVIDLVFEKAIDEPSFSVAYANMCRCLVTLKVPMADKPGNTVNFRKLLLNRCQKEFEKDKADDDVFEKKQKELEAASAPEERTRLHDELEEAKDKARRRSIGNIKFIGELFKLKMLTEAIMHDCVVKLLKNHDEESLECLCRLLTTIGKDLDFEKAKPRMDQYFNQMEKIVKERKTSSRIRFMLQDVIDLRLCNWVSRRADQGPKTIEQIHKEAKIEEQEEQRKVQQLMTKEKRRPGVQRVDEGGWNTVQGAKNSRVLDPSKFLKITKPTIDEKIQLVPKAQLGSWGKGSSGGAKASETDALRSSASSLNRFSALQPPAPSGSTPSTPVEFDSRRTLTSRGSMGREKNDKPLPSATARPNTFMRGGSSKDLLDNQSQEEQRREMLETVKQLTGGVDVERNSTEAERNKTRESAKPEISAMSAHDKAALSEEELERKSKSIIDEFLHINDFKEAMQCVEELNAQGLLHVFVRVGVESTLERSQITRDHMGQLLYQLVQSEKLSKQDFFKGFSETLELADDMAIDIPHIWLYLAELVTPMLKEGGISMRELTIEFSKPLLPVGRAGVLLSEILHLLCKQMSHKKVGALWREADLSWKDFLPEGEDVHNFLLEQKLDFIESDSPCSSEALSKKELSAEELYKRLEKLIIEDKANDEQIFDWVEANLDEIQMSSPTFLRALMTAVCKAAIIADSSTFRVDTAVIKQRVPILLKYLDSDTEKELQALYALQASIVKLDQPANLLRMFFDCLYDEEVISEDAFYKWESSKDPAEQNGKGVKSVTAFFTWLREAEEESEDN

SEQ ID NO: 942 - DNA, 152096 bp, Mus musculus
  misc_feature (1)...(152096): n = A,T,C or G
ctctctctctctctctctctctccctctctctctctctcccacacacacacacatgaataataaaatgtagtataattttaaaagctgtaccaacaacactctataagatatgctcataacctcaatctgatttagatttttttcttacaagatttaaaacactattcattacagtagcaactaaaaacgcatagtctccagattttaacgctactattaacagtgtgatataaaataatacaaaccatctgtgtgggcggggtgtaggtagagctttggcaagtaggaactttatctcccagtgccacctagtggaaatgctaaagcgggcttccagacgctttttaatttctatatgaatatagaaattatatgtattttgagcatatcaactgctcaccccacctccaatgcatcccagagttcctctgctgccttttctcctctctcaacatcacgttctccattcaaaacccatgagttaaatcagtgctgtccataagtgaccatcatttcagaatttacccttaggacggccataaggcagcaagtctgggagaatacaatattcaagtaaacccagcacctaagaaaaatccaattcccatacttgtggtattacttaatgaggtattttaattcataaccatgaaaataaaagcctctttagataagtcagacttatcaagggtttagtgaatctaatgaactaaatatcagttccaaatatgagcttgttaaagaactaaatgcactaaaaagaaaatattacaccataaactttgtagcagctgctgttcgtggggaagctaagctgaagttactgagagcacttcaatcttacacttttatccgatgcatgaatatctatatttccgtaaaccgttccacaacagatcacatcgcctcctttggtttgaacatgcaacttttgactctgaaaaacaaaaaaccacagagggtagagacagtaagcttgcatgaaactttttcttctgtgcatgtccataagataatccagggatttaagcaaagtattgaaaagacaaaaagaaaaaaccgttctcaaaagaatttggtttatagtatctcgaactttgtcacagtcacagatgtgaatctaaaagccaagatatcaatgaatttttagaaagacctgtttccaaagtaactctgctttcagatctgaggctgaccttaagtgaatttctggactgtttctggaactcatgacattgtaagcaaatgttcacatgcatgctcatttgtgtagagagaaataatcatgagattttccaaagaggcctatctatggcttaaagacactgacattgtaacgtgaaactcacctaattcccacacaacatgaaaaagttttaaaagtgaaaataagtcagaaattattgggggaaatttttatgctacatttttaaaaactgcaaatgtgtgacattcacatactttattccttaaggatgctgaataaatgcagcattgccatacgtcttccttggctaagaaagcaagctgggacaagtttaagcctggaaagcacaaatgtaaggtcaaaccccagctccactactttagctgtgtgttcgtgagtgagtctgtaggccttttgctgcctcctagtttgactcttgacaaatgaagatgctccaaggataaacaaggcttagctgagattctcagtacctactaactgttcattagcagtaagcattgttattaaaatagcataaccctatgtatgatgttaaataaccctatgtatgatgccaaataagtgaaagacatattaacagatgatcactaatttaagatgatattgtgccctatttttaaaaacctaggccagctatcttaccagtgtctgcatttatgagtgtaagtaagctaagaccacattgcaagaatacttctctaagtaccagactggtgtcttagtttctttctctgctgctgagatgaaacatgacaaaaccaatgttgggtaggaaagggtttacttgggtccatcggagagggagtctaaggcaagaacctacactgagcaggaatgtcatcaaagaccatgggggagttctccttattagcttcctcagcctgctttcttatatagcctaggaccacctgcctagggatggcacaaccacagtggcctaggccctcctcatcaatcattaatgaagaaaaggcccccacagatttgcctagaggccagtttgatagatactcaattaaggctgcttcttcccagcgactctaatttgaggcaagttgccgtaaaccagaagaacaagtgtcagttttagatctaattcatttttgagctagtatatttgtaaagattgtgggttcatagctctattttctcttaacaagtccttcacagaacaaatacaaagtaaagaaaagaattagactctaccttgaaattactgaaattaattcaccaaaactgaagcatcannnnnnnnnnnnnnnnnnnntgaaattaattcaccaaaactgaagcatcattgagtgaataaacatttctaaggaagaaaagaaattacagtattcttttttttttcagaacagaagtatttttttaattaggtattttcttcatttacatttcaaatgctatcccaaaagccccccatacccccccactcccctacccacccactcccacttcttggccctggcgttcccctgtactgaggcatataaagtttgcaagaccaaagggcctctcttcccagtgatggccaactaggccatctcctgctacatatgcagctagagacacgagctctgggggtacaggttagttcatattgttgttccacttatagggttgcagactcctttagctccttgggtaccttctctagctcctccattgggggccctgtgttccatccaatagatgactgtgagcatccacttctgtgtttgccaggcaccagcatagcctcataagagacagctatatcagggttctgtcagcaaaatcttgctggtgtatgcaatggtgtcagcatttggaggctgattatgggatggattcccgggtgtggcagtctctagatggtccatcctttcgtctcagctccaaactttgtctctgtaaatccttccatggatgttttgttcccaattctaagaaggggcaaagtgtccacaccttggtcttcattcttcttgagtttcatgtgtaaattgtatcttgtatcttgggtattctaagtttctgggctaatatccacttatcagtgaatacatattgtgtgggtttttttgtgattgggtcacctcattcaggatgatgccctccaggtccatccatttgcctaggaatttcataaattcattgtttttaatagctgagtggtactccattgtgtaaatgtaccacattttctgtatccattcctctgttgagggacacctgggttccttccagcttctggctattataaataagggtgctatgaacatagtggagcatgtgtccttgttaccagttggaacatcttctggatatatgcccaggagaggtattgcaggatcctccggtagtactatgtccaattttctgagaaaccgccagactgatttccagagtggttgtacaagcttgcaatcccaccaagagtggaaaagtgtttctctttctccacatcctcgccagcatctgctgtcacctgaatttttgatcttagccattctgactggtatgaggtagaatctcagggttgttttgatttgcatttccctgatgattaaggatgctgaacattttttcaggtgcttctcagccattcggtattcctctggtgagaattctttgtttagctctgagccccatttttgaaattacagtattcttattcagttagtcattcaaattgaagatttttattgcatagtatttttgtttataagaacccaaaccaaactatatgcaaaaactgctatctggggtagtcctaatcttttatgatgtttgcacaattagttcttttagctgcctcatctacaggtaggcaggaaaagcacaagtgcagataaagattgacaaatgaaccaatgagatgaaaacaggatgtgtcaatcattctcatcaatgtcgtaaaagttaaagctatgaaactacaacacaaagatgaccaagttcaacgaagcctatcagagtattgggttttgaccctgcaatgccgtaacaactagaaagacgagcaaccttccctacagagtatattttgaaatatttatagctaagtctaatctcatttttaaaaaatggaatgtaaaaatgttaattacaaaacaagaggaagtatctgctattctgcaaaactgcccgcctaaacctctggtaaaaagcttctagtctattaacagtttcagtaaaatagccgtattttttaagtacagttataggacataaaggctttctttgttctttaataagtagaagaaaatgaaaatgttgcaaaatgtactttgcatcaatgatgcttgagttttaaattaatttcaataatttcaagatagagtttaatttttttaagtacttttttttgttttatagtgtctcaaaatcctaaatatatactttggggtttaactatactttgaaatgaaatctataataataattatgatattataaacataaaactttcaaagttgctatgacatttgtgctttttaaggcaaaatttttggtagagactctaaaagacgaaagagaataatctaaataacaaattaagccttgtagtttgatatagtattttatgttttgtagaggtaaggtatttctgcaacctgaacaaagttaccttcacagactgcaggatgctggtcccctgctcagtgtcgattttacagctatcacattcaatattctgcaccttcacagagccagatcctgatgactcaatactcaaatctagaagcacaagcagaaagaaggaaaaagtcagtgcctaggccacagggcattttagtactccctggatgcccagatcctcagggattcgcagcagtacttagctggagatcagtgtggtttcttcctgaaaacaagaggtctttcctaaggcagcaagaccaaaggcagggctgttctgacagtttagagatcatatctcctgccttgttcatctaaagagaggcaataccacaggagggaagaaaggagctgagacggccatccttgtaggtaggtattcatgtctcctgaggaatatcatagaagccccatgcagcagaaagaacacacacaaatgaataaggatataacagtgaaccagcaagccatcaaatatctgctgagtcggccagccttgtcctatattcccctaatttaaagaatataacaatagtgtagatcagtgtatgtggccatgacctaggctttcaaattctactctagcctttcataaccccaacatgaaaatacttccacataaccacatcagaaggtacttgatgtaacttttaacaaccagaaccacttttaaaaactgagtgatatcagataggggacaatatccactatatatatataaagaactcaagaaaatggactccagaatatcaaataaccctattaaaaatggggtacagagctaaacaaagaattttcacctgaggaataccgaatggctgagaagcacctgaaaaaatgttcaacatccttaatcatcagggaaatgcaaatcaaaacaaccctgaggttccacctcacaccagtcagaatggctaagatcaaaaattcaggtgacagcagatgctggcgtggatgtggagaaaggaacactcctcctttgctggttggattacaagcttgtacaaccactctggaaatcagtctgtcagttcctcagaaaattggacatagtactaccggaggatcccgcaatacctctcctgggcatatatccagaagatgttccaactggtaatgaggacatgctccactatgttcatagcagccttataatcaccaaaaagctggaaagaacccaagtgtccctcaacagaggaatggatatagaaaatgtggtacatttacacaacagagtactactcagctattaaaaacaatgaattcatgaaattcttaggcaaatggatggatctggaggacatcatcctgagtgaggtaacccaatcacaaaagaacacacatgacatgcactcactgataagcggatattagcccagaaagttagaatatccaagatacaatttgcaaaacacatgaaactcaagaagaaggaagatcaaagatacttcgctccttcttagaatggggaacaaaatacccatgggaggagttacagagacaaagtttggagctgagacagaaagaaggaccatccagagaccgccccaccctggggatccatcccatatacaaccaccaaacccagacactattgcatatgccagcaagattttgctgacaggagcctgatatagctcttttttgtgaggctatgccagtgcctggcaaatacagaagtggatgctcacagtcatctatgggatggagcacagggcccctaatgaaggagctagagaaagtacccaaggagctaaatggggtctgcaaccctataggaggaacaacaatatgaactaaccagtaccccccagagctgtgtctctagttgcatatgtagcagaggatggcctagttggccatcaatgggtggagaggcccttggtcttgcaaagatcatatgccccagtacaggggaatgccagggccaggaagcgggagtgggtgggttgaggagcagggcagggggggaggttatagggggctttggggatagcatttgaaatttaaatgaagaaaatatctaataaaaaaaaagaagaaaaaacaaaacaaaaaaaccccgagtgataaggagaattaaagccacaatattgtggataaataagagtgtatttaaagaaaatttggaaaatagggattgaccaggtggccttctcagctgtaatttaaagtgtcactttagatatctccttataaaaacaaaataattgctgggcactacagtgcacgccttttatctcaacatttaggaggcagaggcagatggatctctgagtataaagtcagcttagtctacactgagttccaggatagctagagctctgtaaagggattctgtctccaaaaaaaaaaaaaaaaaaaaaaaaaaccagcaataacaaaatattaaagagtgactacgactatgcaattgcattaatattaaatttcccttaagctggagtacagaaacaaaaactactgtcatgtgaccttggttgatcaaacactgaccaaagtcatttggtgaaggaaagggtttatctcctaacttacggtccatcacgcagtgaagtcaggacaaactcagggcagaaactgaagaggagatcacagagaaataccgccttgctctccaggagtctctcagcttgcttttttttttttaatataacccagggtcaacccgtgtggttgggccctcccatatcaaccattagtcaagaaatgcttcttgattaatgcagacttgcctacaggccaatctgacaaaggcattttctcaattgaggctcctctcccaggtgattctaggtgtgtcgcgctcactacaaactaaccagcacaattatgttccccaaagcgcgttgttgggacccactgccacaactttaatcattacagtataagtgccctccactgcttggcactgggttaaatcagcaacatgcactgagaggaactgagagtgcatgaaagccatgcactgacacaagcagaactgcctgcccacctgagccttgtcatatggcaggaaacaaggcagagctgacaactatacaggtaagcgaagggatgctaaacacactctgttgctgggaaggagggcggggaattaaggttaacacaggagtagtaatgggacatccactgggacactctatcacaagctggaggaacaactatcaataaaatcagcgatgtagatttgaggggcctatggaatcgaggcagtaccctgaaaataagcccctggctttaaaaagaagcagtgaggtaatttgggatcgctgggagaggtaatacccatctcagagaggctgttttaagttttgcctctctctcctttgactcccattttattctgcactgtggtaaagccccaccggcacttcagagtattaaaatttggaggcactgtctcttattcatttaggctagttagaagttgagaagcaacgaagcctaacagctcacatcctagccctgcctacttgtatttaaggtggaaagacacctaaggaagcaaatttcataatgtcaccacgcacggggcctttgtttgttcagtcacagtatgtatcttatacttcctttacttcaatgtcctcatctgaaacggtgacaaaagcatccaccctaccgagcaactgtgagggttaatataaaataattttagaagaggtaaacggtgctattgctatcatcagcaacaccatccttcagttccaggaagaatgagagccccagaaccctttctagaaaagtatgtgtgctcagcggtttgcatctgggaaataaaataacgggactcagatgcctaagaaatacgttttgcaggtactattatgaatttccccagacagtcttaactatgtgtcttgcttcaaagtttgtattcgcagagaatttacttatgcctaaatgaatagacatctaccaacctgggtacctgttggaaagcaaggttttttgttcgtttgtttttgtttttgtttttctagattagctggaagcatctatacatagagctgacgagggaccagagccccgagatgtgggctaccaaaccactggatagttatcaagaaacctcaaccctgaacgatgctaatgactgtgatgctaatggctccacaatgtaattagactcagattattccaatacaagcttccactcggctttaattttcctccttaattggaaacccaacgcttaaacactattagttttgtgacccaaaccctttttcacttcacttgccaaatttgacgggcgcgttcacctccaccgacgcctgggggtcgatgtcgtccgacagaatggccatctcctgccgatcagcatcatacttgacctgcaggctgtccaggccgcgcgccacgtgctccacgccgcacaccgccacctgcacgcggtcgccatccgggtgcgcaaggggatccaggggcctcacggccaggtggcaagggagccgcgccctcagtcgcccaaacgggctcacctgcagcgtccactccctcagagccccacgcgccaggccggccccagagtcatcgggcgctgatccctgccgctgcgccccactggagccgcaagtccgagccccgagagctccgaccaaggcgcccgcccgcactcgggacgcgcaaggagggaggcggccgaacatgctctcccttggaacgcttcagccttggctcgctggtcccgggaccacaagaaccacgagctgcctcgggtcagtcacgaaggggacagcatgcacggctccgccaaggaagaacgagccaggcccccagcacagtacttaacgccttaaatcccggtaggaaagttaaaacttcaaagagcctagttgaaaccctgacctggacaagtcacctatttccgcccctttggcggaggccatcgggatatgtagttttaaaggagccaaacatcaaggtgttctggtaactgtgaaactacatatcccaggagacagtgcgctgaatacacagactgacagccgattggtagaggagcccccgctcccccctcgttgctttcccgttgcttcaagcccattggccaagagagcagagaaagaaaaaaagttaatgtaactgaccaataggaagagtagaagggacgggataaactcagctgtggttactttggataccaaggacgcgactcttaggagagggtgaagttttgaagtgagaccccagggaccaaaacacacggagaaaaataagagtttaaacaaggatcaggaccaaaagaaagggtaagaaacagcatgtttatagatgggaatcagattcaaagttaggaatactttctttaggtagttagaaccaaaggtcaccaaactaatgtggattccctgggaatagagaatccccctcacaagagaccttagcatgagaggacagacacgttctgttgctttctcccttctctgtcctttaagggaactcccacttaggtaaaaaatactagatagaaaaagtgttagaagccaggtatggtggcgcacgcctttagtcccagcactcaggagacagaggcaggtggatttctgagttcgaggccagcctggtctacagagtgagttccaggacagcctgggctatacagagaaaccctgtctcgaaaaagaaaaaagaaaaaaaaggaaaagaaaaagtgttagaattctggctctttcttaactgtaagtagtaatcttaggccagtcattggatgcctttgggttttactatttgcttataaaatgatgacactatcttccttgtcttgtgtagaagttttttttttcgtttttaccacatttatcaaatgaaacaatggacaacaaagcagtgcacagtatacaaaacaaagtattttaggaatggcatatgtctacgttgctaagagatttggagacatttgaacttggttagaggacagtcttgatctctttccctgcaactggtccttggccttaatggtaaaataaaatctctctctctctctctctctctctctctctctctctctctctctctggatcataagacttgttaggggatgtcagaattttttcctggtcctgttgtattatctatggcacaagaaatgtttcttcagttttgatataagacagactgtgctaaataactctataagttaactcttttttttattattcagtaggcagtaaagataatgggaaatggggggtgtggacattatttcagccatatttgcctattcttctccccattctacaaataattccctaaattccttacatacagatttaactaattgcaagtccagtgtgatggtgttcacttgtaagttttcagagtttgggaagctgaagcagaaagatctcaaatctgaggcccacctggactatatacggagaacgttgtgacaaataaaatacacaataagtaaataaaatgatacctttaaagatcaaaactctcagccaaatatgggaccccaattctttgaacctgaagtgacagatggatagatagactaggctaaagtcctccccagcgtccatgttgttctcttagtgaagactatggtagtggtggtggcagtgacagccctgccctgctgtcagccatctgagaagaaggcccctatccttgaggacctccaccaaggtgaaacctgtccttgactttgctggaaaaaaaatgttgggagaagctaatgtgaaagagggttgatttaaaatagattttaaacaagggtttaagagcacaggggttgctagaggtgactgatcacacagggagagaaagagacacacccaagagcacaggtgtaagctcccttgagcttgccctaagtgacttagcagaagtgctccagagtcactcttttgctgactctcatgttatgcctcaaaggatttctctaagaaacttctttaaaacctttctcttcttcttctttttcaataagtgagattataggattactctagagatgtcttggattgggttacagtcctaaaataaaactgtgtgtcacaagaattgtaaaagggaattaaaacatgtcctttactagaagtagggttttgggtaagatttctagaaaactgttggtttatagctgagaaagaagaaagaacacatatatttaggccttacatgtgatccattgctccttcaacaatgtaacttgaaagtatcactatgtaagagactggtgatcctcatcgataatgttgacagctgtgttagaactcttcatcttcagctggtgagacacactggtcaggctctggaatgagggctccttttattcccagttctccatcatgttcccgtgtttctctcctgcctcagtaggctataagatagactttatgataagcaagtgctcactcagtgagtagcgccattggctttgtgtcccatgtggacgtacgtactcagacgagccttcaagttatcttttttaaatgaaaacccaagagtcatactttgacatttgaaagaggcacaagcaagttgaaactgcgctctgatttgctgtggacgtgctgcatatatttgggccgaatatgcatccttaataaatcatcctgttcctatagtcacttttccttttctgaggaaaaataacttaatagaactgacaactgagccatcatgatatctgtgacacggtcattatttcattactttcaagcaaaggaactaaaacgtactgaaagactaccttcctgcttttatgagggtggaacccgagaatctggtagagattaagagtgacgtaagatattagttaccaatgcctaacaagctagtcagtatcaaacttgtctacctgtaaaagtgagtgatatagttttcaaagtatgttcccgtgtaccatctcacggttttctcacaaaaagctattaagaaggatagttattcttctccctgcatgacagctgaagaaacaagattcagaaaaacaagatgaagccattatgacccccaaaactgtggttctggggggatgagagcattaaattacaaatgtacaagatttttttgttttgtaggactacttattaataaattatttctctgctggtgagatgagccaattcaacccagattagattatattaaattccggtttattgctcttgggtgggcaagttcattgaccccaaggaagggggagagagggaaagaaagagcacacacacacacacacacacacacacacacacagagagagagagagagagagagagagagagagagagagagagacacgaaaatgtctggattatatagggaagagcccctgggggaagggcagcccagcccctgggctgcaaacttcaggggtggaggcaggatatgccaggaagggactgagggatgttgggagaacctggaggccacatctgctttgatatgttaaaatatgcacctcactcccttgtcttggagtctgaagccaaacacttaaaagagtttgaaataatttaaaaatctaagtgcccctaaatgagagagtaatgcttaaataaattttatatttgtaatattataaagaaatctaaaaataatatcctgaaataatccataatataatattgggtaatagagtacttagtaacctttgtgtattagttcaatctcaattctgtaacggcaataatatatttaatatagaattacatcacagaaacaattccagaaggatgcacaccaccttataatgatggctatctatctctaagccacgaggttagatgattacatcatttgcatgttatcagtagtgatcatgtttggcatttttaatgaagagaaacagtaaggccttcttagtgtgtactgttgcctaaggctgtcttagaaatgtagggaatttcttagcatccaaacataaatgcagttgtgtagagaatctcctaccaaatcaatgtgaaaggtggtgactttgttattactttatgttcaattcatggacagcagagggcagaagagttttcagaagaaaaggtaatcagaccaaggattaagtagctcagttaaagggatgaaggccaccaaactgtgctcgattctgaattacagataatgtttaaaacaaacaaaaaaacttctgcagtttctgttattcttataagacaataatacactcagaaacctaagagctatcacttctgagaatatataatgaatacgcaggtggacccacttggaatcaccttgtgaaactgccaggctaaccatacctgtgaattgtgaatcagctgagctcgctggccaatttaaaacttcaggggaagcgtttggcatctcacagtcaaccgtgatgttggctgcacaattttccaatgcccctttgaagatatttaactcctggtttactttttatttgagtgatattatattttaaatgattttttctgtttgtattgagatgaccagatggtcgttttgaaatggactgtggtgtggtgatatctcagaataatttaaatattgaaccatttttccttccctggatgagctttaatcatgttgtgatcttttctgtataagttggtagattcaactaatggatcaatgagaatttttgtattttattttatatgagctattagcctgaaattttctttgacattttttcttcttttaggtatcagggtaaattaggaggaaagtgttccatcttttttctttctgagagaattaattggtattgtggtttgcttttatttgtttttctcaaaaataaatccactttcttggttttgttttttggatttatttattttatgtatgtatatcagtgctctatctgcatatacgctggcatgccagaggagggcatcagaacttattctaaatgattgtgagccaccatgtgggtgctgggaattgaactcagaaccactggaactcagtgcccttaactgctaagccatctctttagccaaatatctggatatgtgtgaaatttgcactctctcatgtgtgccccttagctgtgtttgcatgctgtgcatctcttcagtctttgtacatcatcctggattgtgtactcaaatctgtgttcacgtctgctaattctttcctagttttagctaatcttgtatggaatgtccctatagggttttcttagtttttaaattaggtttattttttcttatgtgtttggatgctttgcttgaatgtgtggctatgctaggtaccatatgagtgtctggtgcctacaaagatcagaaaagggtgtcagatcccctgagagctctcatgtggattctgggaatccaacccaggttctcttcaaaagcaatcactaggccatttctctaaccccacattttcttcctaatggctgtgtcttcttttggggggttgatttggtttttctacaaatctgctttctctttaaaattgccctgtgtgttgtagttcttttttagtttcaatgttacatctttgaactgttttgaaattcagttacactgtgtacaacttacatgttgctgtttctcttttgtggtctccctctcttgggctttctttcctaccatggcctctatatctgttattggtctcccatctccaataggagttaactgttgaggaagtcctttcacaactaagttaggatgattccctcctggctggtgaggagcagcttcattcaaagccttttagttttctggtcatgggaaagtttttaatttttaaccatttcatttgtctttaggttttagctttttaaaaataaactagctcattcatataggaaatgaatgcaaactataaggtaaaaggaaatgtataatgaactgaacatatttttgcaaaatctcaatttaagaattaagatactttcgttgtgggtttttttttccctctgtttattttgtgtccttcctgtgggctgaactgaaatgaggaccaaaagactactcagatgcagaaattggagggaaatccggtttgcttttgttctgttggtcctgccccaaggccagttccactcaaatttgcactggcattgtcaggtcatacagacacccaaaagtacgacagacactgagcctttaatagagaaaaagggtggggactggggtggggtgaagatataggggatacccgtgctcttttcttttttcttgctacttggccttgtgggactgaaatattgggcactaaatgacaacataaggtaaggttatgtgagaacctggtctctcaggttcaaaggaaccacaacaagctaggaagagttacaagggaatttcatatgagacctcgggaaaatgatgcttgattttacatctgatctctacaaacacccaaaatgggcttcacctctgcataaacatggaagacagccaaaaatttaattaagacttgaagaagttgacagcagtaaaacacccagctctcaagacaactttgaattttgcatttatataaaaagtcattccacataacaaaggctttggaaagaaaacattacaaccactctccacagaaggcagataattgtggtctgggtgtaactaaactgcatggctataaacagcaaacaaactgagtaagtcttaaggagacccagagctttacagaatagtatttaaaacattcaacatccaagcaaaaattacccaacaaatccaacatatcagaaacagtctgaccagttttcaataggaaaaaaaaatcaacaaatccatcttcataataggtttatttacattatctagaaaaactttgaaccaatccagatatctctcaaatatgagtgggaaaacaagtctcttgcatccatttgaagaggtgatagcctatgaaacagataaatggcaaaattctttttaaattttatttactctttttttttaacactccagattttatttccttccaagtttaccctctgactgtttcacatcccatacctcctccctgccctgggtcttcatgaggatgtctccacccccacccccacctcaccagacttctaaactccctggggcctcatgtctcttgagggttaggtgcatcttctctgactgaacccagacctggcagtcctctgctgtatatgtgttgggggcctcatatcagctggaccacctagttagtggtccagtgtctaagagatcttgggggtccagggtaattgagactgctggttctcttacaggattgttttcctacagggtcaccctcctcctcagcttctttcagcttttccttaattaaaccacagtgtccagcagcttctgtccactgattgggtgcaaatatctgcatctgactctttcagctgcttgttgggtcttttggagggcagtcatgataggtccctttttgtgagtgctccatagcctcagtaatagtctcaggccttgggacctccccttgagctggatcccactttgggcctgtcgctggaccttctttccctcaggctcctctccatttccatccctgcagttctttcagacaggaacaattataggtcagagttttcactgtgggatgacaaccccatccctcacttgatgctctgtcttcctgctggaggtggtctctataagtttcctctccccattgtagggcatttcatctaagatccctctctttgaatcaagagagtctctcacctcctagatctctggtatattttggagggtccccccaacctcctacctcccaagattgcctgtttccattctttctgctggccctcaggacttcagtcattttccttcacccaataccagatcatgtccccccctccccaattccctttctctcctaggtccctcccccccttgtgattgatttttttctctcccaagtgggactgaggtgtcctcacttgggcccttaagcttgttgaactttttgagttctgtggactgtaccttgggtattctgtacattttttggctaatagccacttattagtgagtgcatactatgcatgtccttttgggtctgattatctcaggatgatattttctagttccatccatttgcctggaaaactcaggatgtcctcattcttaatagctgaataatattccatgtgtaaatgaaccacattttctgtatccattcttctgtcgtgggacatctaggttgttttcagcttctggctatcacaaataaagccattatgaccatagtcaaacatgtgcccctgtggcatggtggggcatcttttgggtatattcccaagagtggtattactgggtcttcaggtagatctatttccaattttctgaagagcctccagattgatttccagagtggttgtaccagtttgcaatctcaccagcaatagatgagtgttcctctttctccacatcctctccaacatgtgttgtcacctgtggttttgatcttatccattctgatttgtgtaaggtggaagggaatctcaggatcattttgatttgcattatctgatcactaagggctttgaacatttctttaggtgtttctcagccattcaagattcctcagttgtgaattctcggtttagttctataccccattttttgattgagttgttagctttttgatttctttatatattttacatattaaccctctattggatatggggttagtgaagatttttttcccaatctgtaggttgctgatttgccttattaactatgtcctttgccttatagaaactttacagtttcatgaggacccatttatcaattcttgttcttagagtgtgagccattggagtttaggaaatttccccctgtgccattgagttcaaggctctttcccactttctcttctattggattcagtgtatctggttttatattgaggtccttgatccacttggacttgagctttgtgcaaggtgacaaatatgggtctattttcattcttctacatacagacagccaattagaccagtactatttatcaaagatgctttctttttttccattgtatatttttagcttctttgtcaaagatcaagtgtgcgttagtgtgtggttttatttctggtcttcaattctattcattgatcaacatgtctgtgtctgtactactaccatacagtttttaatcactattgctctgtagtacagctttaggtcaggaatggttattcccccagaagtccttttattgttaagaattgttttcgctatctggggttttttgcctttccagatgaatttgagaatttttctttccatgtctttgaagaagtgtgttgggattttgatgtggattgcattgaatctgtagattgcctttggtaggatggccatctttactatgttaattctgccaatccatgagcatgggagatctctccattttctgagatcttcttaggtttctgaccacactggtctctccagagacgaacatctgactgagtcttgggagggcatggtacctactctcctttgggagttctgcatccccaactggtctcaactgtacagtttccaaagctcctttagtaatagcctcatatcacaccttaaagaattcttaggcttttagtttccctaccaaactcaatacctgtctctcaccactctatgacctctccggcctctgcacctagagaattctctttgcttgtcatctgaagggataaaagtcgtgatgtcttattgctgttcccaaattccctcatcagtgcattgatattcttaaatgcctgagctctaaactgtttccttctttaaggtaaggttctgggttcatatggtactctgagggggctgtgtgaaacttttctctcatcaccaactcagaaatttatttttatataatataattcatccaaatatttattcatttaaatttattttatttgcgtatttattttatttagatttgtgttatttaaatatttattttgtttaggtttgtgttagacttatttacttattttatttagacttaattacttactttattttatttttcttgcttcttccaatgcaaaggtaggaaaattgggttggtaaactattcttctaactgggtaattgataagcctttgtcctctagaggaactagattgggtaagtgactctatgtggaggaagactaatttgaaggttgactttgggtgggtggagacaggaaatgcctacttaaccagaaagggagactgtgaacaacacagacatgggaggggcacctggcccacttcacctgctgtgcatggtggctcttccctgacttggagttgactaaggactgtcttgctcactttctctttcttcaatacccaatgtcctgcacaattctagccctttgttttagatcttatggtgtaatttgaagagcaaacctcccattgaagtttgctatgcattcacactaataccagattagagttctgggataaactcctggacaggaccaactcatagagcttgtgtgttattgaaatgttaacagagcatcatatatgcaagacaaaagaactggccagtggtgtatgcacgttcatgatggtggaggagtgtctgctgtgctctgggctgaggccactgctgtcaacccctttagcagctgatgggacagatagaggtttcattattgtgcttaggtcactcaggaagggaagaattgagattgaagtctaaactgaacttcaagtaagtttccatccctggggaccagtttaaagtggtgaaccccaggctgtgtaaggaagaggaggagaatgaagaagaggaggaggaagaagagggagtagtcatctattacaaaagcctaagaagaaagggcttttccaagaccattgggggaaatctttgaagatatatgtttttaattttgtgcctatgtgagttaatgggcacacatgcttgccggtgtctgtagggtcagaagatggagatgtattccttggaactggaattataggaactgggagctacttgatgtaggtgttaggaacccgacctgggtcttctgcaatagcagtgagtgctcttagctgctgggccatctctccagatctatggagaaagtcttaaatgagatataatatgaatggataaggaccgtaagtcatagttttaataaatcctgttgtttattagtgctgatcttgggtggatcctctaccctttctgaatttcaaattccttctctacaaaatgtagatatttgtgtggcatatgcttgaagtatacatggtatgtgctagaaatagaggaagtcatgcaagggaagctttatctaaatgatctatttgccaagggctcttaaatgctgttatttgattcatagtgaatggccactgggcaagagtgccttcacgctgacagggtaaccaggcatctacattggcgacaatgcctgtttctgtgaccattctgtcaccaactctaagaaagagaaaaatgtccaagaagggacttgaaaggtgggcaaggcgcttgtcttggatctgtgcttagaataccatggctgtggagagagggaggcgagagggtagttcagtgggggagaagacttagcacatccatccatcctcccattccacggaacagggcttatgctagaacacagccatgggttctccacaatccgggcaagcaggagggtcatttgattatgcgtgtgcatagtttaagatgtaactgtgtaatgtgtgtgaaattttaacagctatctgtgcacttagagcttcctctcagaagcaaccatcctccttctatccttccctcccttcttcccttcctcccttgatttctttgtctctgcctgtctctgtatttctgtccctctgtccctctgtttctttctcccctccatctctctgtctccatctccctccccttctccctctacctccccacaccctctctctccctgtatgtgtgtgtgtgtctgtgtgtgtctgtgtgtgtgtgtgtgtgagagagagagagagagagagagagagagagagagagagagctcttttcacgctgttttccccaaatcttctctgtagctttagaaaaatactcctggcctaattcagtcattgtctaataagagtgaatcttggctaattgtacatagaataaagaatgaaagataactgtaagaaaagcaattattttactggttgcatttacgattgtcaaactggtagtgtctgatactgctgttgaccactaaatggatctgagtatgccttatttaagatgggctcgtgagtattctatattacacaccaaagtcattttagtatgagctttcagtgagacatttaatgtgcttttcaaaagaaatctgaataagatcacagagctgttatattaggattaaggggcacttttcttacaaccatttaccagtgttttcttaccaatcacttgacactaatatgatttaaaaaatttttttttcgaaactgaaacaaaaataaataaatggaagtttctcagagttcctccttcctccaagatgtttgactctgagtaactatggaaacagagacatggtaacccacagcattgggcttctggggaaaggaacacagggtcatgtttctctgccagtcacaagaactcggttacacaaaacagaatgatcagagagcatgtgggcccagaaaggaaaaataacatttgtgactttcatgttagaacatgctgtttctagagtgaccaaacatatgcactctgtggctggtgatatcgaaagatacagtttcataccatatctttaccttggagcatcatggttgcttgcagccttgctccagtctctggaatgttggttatttaagttttgcacatgctccttgaaagttgagaaaattttctataggaggaccagcagtctcaattaatctggacccccaagatctctcaaacactggaccaccaaccaggcagtgtacaccagctgatacaagtcctccaacacatatacagcagaggactgccaggtctatgttcattcagagatgatgcacctaaccctcaagagactggaggccccagggagtttagaggtcagatggggtgggggtggggacatccacgtggagacaggggattggggaggagttgtgggatgtggaacagtcagagggtggacggagtgggggaaataaaatatggcgtgtaaaaaaattaattaatttaaaaaaaaaaagagttcagaggcaaaaccaagtgctgatcacctatgtcaagctttgaaagaagaggaagtggtggtttgtcttacaaaatggtgcaaaccccagagttcattgcttcaggtttttctcctttgtggagcttcctgttttgggttttatcttaaccgcctctgacacgaagtgagaaaaaccatcatgagatgtccctctgagataggactgaagcgtttctgtttcacttcatctcttcctcaccagccttttgctgtctgcatcacaaactcgggtggtgctcatgtaagatatggcaagaccacatcctcagacccttacagcccagcatggctcagctttccagagaggacagctatcctggagaacctgatctacagtggtgctcctgcaagcctgcagtgcatgccagcctgctgttgaaactcaagtctttgtggggtcacaaagcattttaaaatgtatgcctgtgactcttctgtcttgctgcccttttatgaacaacctgaagccacattgttgtcttccttatttggccaccacggtgtctggtttctgcccatgacactgtgctgtctccaagtcaccaaattcatgttctttccaagcggtgactctaggataaggtagctgtgagtgcagcagctctctagtatctgtgaacgagagtccagattctggcagttagtgttgtcacagtctcacctacctttgtaagaagagtgcccgttgtagttacttttctatgtattgtcatgacagaataccaaggtaacttacagaagaaagagtccaactttcatatacccatgagactctcgtcaccatcaaagtcatcgaaatatatgttacatccaaagatactttcttcctcttttactatcgtgttattgagtttaataatacttataattccagcacttggggtccagaggcaggcagatccctgtgaattttgaaccagccagggatacacagagagacactgcctcaaaaataaacaccaggatttatttaagtaatttcaagtagacttaagtcgaactagtactagtagactcatagttaactaacagactaatacagttctgagcattgtgttatatgaatttccagagctttttttcctggaataacttcaactttataactttagtcatcactccaaattccccacaatccctcagaccaaatatctgactctgtttctgtgagtatgttagactacagtagctccatctctctgtcaagtttattttacttagaataaagaactcttgagagactagtctacacaggtgagtgtgtggactacagaagctaacagcttctgggacaggcgaaagcaacacagcttctgggacagacccagttttgggctccagacatctgggcaccttccctgccagaggagaggtgtctgccccacctgggagggctttgccagagtacctgggggagccatcttgattcccagatccctcagagactagtctgctcaggtgagagtgtgaactacagaagctaacagcttctgggacagacagaagccacacagcttctggggcagaccctgtttcgggctctagacatctgggcaccttccctgccagagaagaagtgtctgccctgccctggagggctttgtcagagcatctgggggagccatctctggtctgggatctctcagagactatactatgtaggtgagagtgccgactacagaagctacacagcttctgggacaggccctgtttcaggccttcatcttctgccaggaggcaggtccgaatgccagatatctgtgcaccttccctgcaggaggagagcttgcctgcagagagtactctgaccactgaaactcacgagaaatctagtctcccaggtctactgatagaggctaacagaatcactggaggaacaagctctaaccagagacagctataacaactaactccagagattaccagatggctaaaggcaaacgcaagaatcttactaacagaaaccaagaccactcaccatcatcagaacccagcactcccaactcagccagtcctggatacccaacacacccaaaaagctagacccggatttaatgataatgataatgataatgataatgataatgataatggtagaggatgtcaagaagaactttaataactcacttaaagaaatacaggagaacactgctaaagaggtacaagtccttaaagaaaaacaggaaaacacaaccaaacaggtagaaatccttaaagaaaaacaggaaaacacaaccaaacaggtgatggaattgaacaaaaccatacaagacctaaaaagggaagtagacacaataaaaaaaaaaaaatccaaagtgaggtaacgctggggatagaaaccctaggaaagagatctggaaccatagatgcgagcatcagcaacagaatacaagagatggaagagagagtctcaggtgcagaagattccatagagaatatgagcacaacaatcaaagaaaatgcaaaatgcaaaaagatcctaagtcaaaacatccaggaaatccaggacacaatgaggagaccaaacctacaaataataggagtagatgagaatgaagattttcaatttaaagggccagcaaatatcttcaacaaaattatagaagaaaacttcccaaagctaaagaaagagatgcccatgaacatacaagaagcatacagaactccaaatagactggaccagaaaagaaattcctcctgacacataataatcagaacaacaaatgcactaaataaagatagaatattaaaagcagtaagggaaaaaggtcaagtaacatataaaggcagacctattagaattactccagacttttcaccagagactatgaaagccagaagatcctggacagaagttatacagacactaagagaacacaaatgccagcccaggctaggctaatatacccagccaaactttcaattaccatagatggagaaaccaaagtattccatgacaaaaccaaattcacacaatatctttccacgaatccagcccttcaaaggataataacagaaaaaacaaacaaacaaaaaaaaaaaaaaacaaggacggaaactacgccctagaagaagcaagaaagtaatccttcaacaaatctaaaagaagacagccacaagaacagaatgccaaaactaacaacaaaaataatagggagcaacaattacttttccttaatatctcttaatatcaattgactcaattccccaataaaaagacatagactaacagactggctacacaaacaggatccaacattttgctgcttacaggaatcccatctcagggaaaaagacagacagtacctcagagtgaaaggctggaaaacaattttccaagcaaatggtctgaagaaacaagctggagtagccattctaatatcgaataaaatcgacttccaacccaaagttatctaaaaagacaaggagggacacttcatactcatcaaaggtaaaattttccaagaggaactctcaattctgaatatctatgctccaaatgcaagggcagccacattcattaaagaaactttagtaaagctcaaagcacacatacacctcacacaataatagtgggacacttcaacacatcactttcatcaatggacagagcatggaaacaaaaactaaacagggacacagtgaaactaacagaagttatgaaacaaatagatttaacaaatatctacagaacattttatcctaaaacaaaaggatatatcttcttctcagtacctaatggtaccttctccaaaattgaccatataattggtcacaaaacaggcctcaacagatacaaaaatattgatattgtcccatgcatcctatcagatcaccatggactaaggctgaccttcaataacaacataaataatagaaagccaacattcacgtggaaactgaacaacactcttctcaatgataccttggtcaaggaaggaataaagaaagaaattaaggactttttggagtttaatgaaaatgaagccacaacatacccaaacttatgggacacaatgaaagcattcctaagaggaaaactcatacctctgagtgcctccaaaaagaaactagagagagcacacattagcagcttgacaacacacctaaaacgtctagaagaaaaggaagcaaattcacccaagaggagtagaaggcaggaaataatcaaactcaggggtgaaatcaaccaagtggaaacaagaagaactgttcaaagaatcaaccaatcaaggagctggttctttgagaaaatcaacaagatagataaacccttagccagactcactagagggcacagggaaagcatcctaattaacaaaatcagaaatgaaaagggagacataacacatcctgaagaaatccaaaacaccatcagatccttctacaaaaggctatactcaacaaaacgggagaacctggatgaaatgaacaaatttctagacagataccaggtaccaaaattaaatcaggatcagattaatgatctaaacagtcctatatcccctaaagaaatagaagcattatttaatagtctcccaaccacaaaaagcccaggaccagattggtttagtgcagagttctatcagaccttcaaagaagatctaattcaagttcttcacaaactattccacaaaatagaagcagaaggtactctacccaattcattttatgaagccacaattactctgatacctaaagcacagaaagacccaacaaagatagagaacttcagaccaatttcccttatgaatatcgatgcaaaaatactcaataaaattctcgctaaccgaatccaagaacacatcaaaaaaaatcatccatcctgaccaagtaggtttcattccagggatgcagggatggtttaatatatggaaatccatcaatgtaatccactatataaacaaactcaaagacaaaaacccacatgatcatctccctagattcggagaaatcatttgacaaaatcgaacacccattcatgataaaagttctggaaagatcaggaattcgaggcccatacctaaacatgataaaagcaatctacagcaaaccagtagccaacatcaaagtaaatggtgagaaactggaagcaatcccactaaaatcagggactagacaaggctgcccactttttcactacctattcaacattgtacttgaagtcctaactagagcaatttgacatcaaaaggagatcaaggggatacaaattggaaaggaagaagccaaaatatcactttttggagatgatatgatagtatatatgtgactataaagattccaccagagaactcctaaacctgataaacagcttcagtgaagtagctgcatataaaattaactcaaacaagtcaatggccttcctctacacaaaggataaacaggctgagaaagaaattagggaaaccacacccttcacaatagtcacaaatataaaataccttggcgtgactctaactaaggaagtgaaagatctgtatgataagaacttcaagtctctgaagaaagaaattaaagaagatctcagaagatggaaagatctcccatgctcatggattggcaggatcaatatagtaaaagtggctatcttgccaaaagcaatctacagattcaatgcaatccccatcaaaattccaactcaattcttcaacgaattagaaagggcaatttgcaaattcatctggaataacaaaaaacctaggatagcaaaaattcttctcaatgataaaagaacctctgggggaatcaccatgtctgacctaaagctgtatgatagagcaattatgataaaaactgcatggtactggtatagcaacagaaaattagaccaatggaatagaattgaagacctagaaatgaacccacacacctatggtcacttgatctttgacacgggagctaaaaccatccagtggaaaaaaagacagcattttcaacaaatggtgctggcacaactggcgtttaacatgcagaatatgaattgatccattcctatctccttgtactaaggtcaaatctaagtggatcaaggaactccacataaaactagagacagtgaaacttctagaggagaaagtagggaaaaccctcaaagatatgggtacaggggaaagattcctgaatagaacagcaatggcttgtgctgtaagatcgagaatgggcaaatgggacctcataaaattgcaaagcttctgcagggcaaaagacaccatcaataagacaaaaaggccaccaacagattgggaaaggatctttaccaatcctaagtcagataggggactaatatccaatatatataaagaactcaagaaggtggactccagaaaatcaaataacaccattaaaaaatgggggtcagagctaaacaagaattctcacctgaggaataccgaatggctgagaagcacctgaaaaaatgttcagcatccttaatcatcagggaaatgcaaatcaaaacaaccctgaggttccacctcacaccagtcagaatggctaagatcaaaaattcaggtgacagcagatgctggcgaggatgtggagaaaggggaacactcctccattgttggtgggattgcaagcttgtacaaccactctggaaatcagtctggcggtttctcagaaaattggacatagtactaccggaggatcccgcaatacctctcctgggtatatatccagaagatgacccaaccggtaagaaggacacatgctccaccatgttcatagcagccttatttataatagccagaagctggaaagaactcagatgtccctcaacagaggaatggatacaaaaaatgtggtacatttacacaatggagtactactcagctattaaaaagaatgaattgatgaaattcctaggcaaatggatggacctggagggtattatcctgagtgaggtaacccaataacaaaagaactcaaatgatatgtactctctgataagtggatattagcccagaaacttagaatacccaagatacaagatacaatttgcaaagcacatgaaactcaagaagaacgaagaccaaagtgtggacactttgccccttcttagaattgggaacaaaacacccatggaaggagttacagagacaaagtttggagctgaggcgaaaggatagaccatctagagactgccattcctggggatccttaatcagtctccaaacgctgacaccattgcatacaacagcaagattttgctgaaaggaccctgatatagctgtctcttgtgaggctatgccggggcctggcaaacacagaaatggatgctcacagtcagctattggatggaacatagggcccccaatggaggagctagagaaagtacccaaggagctaaagggatctgcaaccctataggtggaacaacaatatgaactgaccagtaccccccagagctcgtgtctttagctgcatatgtatcagaagatgacctagtcggccatcactgggaagggaggccccttggttttgtaaattttatatgcctcaatacaggggaatgtcacgtcaagaagtgggagtgggtgggtaggggggtgagtgtgtgtgtgtggggaagggtctgggggacttttgggatagcatttgaaatgtaagtgaaaaaatacctaattaaaaaaataaatttaaaaaatacaaaacaaaaaacatatatatcatccccatgaatttgcaataaagcaatttgattccaaaaaataaataaataaataaaaacctcttggtctatctataacatcactctggtggtttgaatgaaaatgactcccataggctcagagagagtggcaccacaaggaggtatatccttgttgaagtaggtgtggccttattgttgaagaagtgtgtcactgggggtgggcttcgaggtttcagatgctcaagttagggaaagttccttctctctcttcctgctgtttgctgatctggacacagaactctcagctctctctccagcatcatgtctacctgcatactgccatgctttctgccatgtgatgatggactaaacctgtgaacctgtaagccggccccagttaaatgctttcttttataagatttgccatggtcatagtgtctgtgtctcctcacaataggaaagtccactaagacaatctcacactttttaatgactgcttctatttctttagtggctatggtgctgtttaaatagtttacctgatcttgatttaactttggtaagtggcgtctgtctagaaaattgtccattttgttaaaatttttccaattttgtggagtacaagcttttgaagtaagacctaatgattctttcaattccttcagtgtcagttattacatctcccttttcattactgagttgcccaatttccatgaatttgtaggcttttcagtatttctgttgttgttgaagttcagttttaatccattgtggtctgataagatacaaggcattatttcaattttcttgtatctgttgaggctttctttgtgaccgactatatagtcaatattagagaaagatccatgaggggctgagaagaaggctttttcttttgtgtttgggtgaaatattctatagctgtctgttaggcccatttaattcataatgtctgttagtttcattattactctgtttagtttttgtctggatatcctgtcagttgaaagtgaggtattgcagtcttccactactaatgtgttgggttcaatgtgcaatttaagctttagcaatgtttctcttacaaatatgggttccccttgtgtttgggacataaatgttcagaatttagatattatcttggtagatttttcctttgatgaatattaagtgtccttccccatctcttttgatttattttggttgaaagtctattttatcagatattagaatggctattgcagcttgcttctgggtctgtttgcttagacaactttttttccagccctttgctctgaggtaatggctatctttattattcaggtgtattacttgtgtgcaacggagtgatgggtcctgatttcacatctattctgttagcccgtgtctcttttggggggtagggaggattgagttcactggtgttgaaaaatattaatgaccagtgattgttatttcctgttgttttgatgttagtagtgtttgtgtgtgtatgtgtgtgtttccttggttttgctggtatggaattccttatttcctgtgttttcttaggtgtagttatccttcttgggttggagttttcattctagtattttctgtagggttggatttataaatagatattgtttgaatttgaatttttcttgaaatatcttgttttctccatctatggtgcttgagagttttgctgggtgattgagagttttgtctaggtgggcagccatagttttttagaggttgcaagacatctgtctaggccctttctagcttttacagtttctgttaagatgtatggtgcaattctgataggcctgcctttgtgtgttacctggcctttcccccttgctgctttctaacatctttctttgttctgtagattttgtgttttgatcattttacaacaggaggtttttctttctagtccagtctaattggtgttctataaccttcttgtatatttataggcatctctttctttaggttgggaaggttttcttctatgtttttgtcgagaatattttctggtccttggagcttggactcttcacctccttctattcgtattattctaaggttagatcttttcatcatatcccagatttcctggatgttttgtatcaggaattttctcgctttaacattttctttgactgaagtgtcaatatcttctgttgtatcctctatgccagagtccatcttccatctcctatattccgttgttgatgtttctcttcgctaggttttcctctccaggattccctcagtttgtattttctttattgcatctatttctactttcaggtcttgcagttttatttccttcacccatttaattgcattgttgcgctcacctcttctggcaaggaaaaaatgcaacatggtcagattcttctcaacagctttattgcaggaacacctcgatgctacgggaacccagggaggactgcttatatacaccccaacactggggagggctatgtgtcctcctgggattggtcagtctgccggcactttaatttgcatgcacctgcttgggaggggttggcgccagattcaggctagcacctgcacctgcgaagtggcattgtttactgcgcctgtgtactggagacaagcaccatcttttaggcaccagctgcctacattgtattttcctgtatttctttaagggatttattcatttcctccttaaaggcttcaatcatctttataagattggatttaatgtcattttcttatgttttggttatatcctgtagtggggtagtggagtagctgtgctttggagatgtcatattgccctggcttttgttgattgtgctcttccaagggcctttagtcatctgaatggttttggtccctggatgctcttgttgtagtaggtattgggaggagggtgaaccttgatggtcttggcatggcaggcctctgatgggtatggtatcttgagtagtatggttccagacctggagatctgtatggttcaagagcctcagatatgataaaggtgggcagagaggtggcaggagaatggaggtctctcagggctagcaggctactcagagcaccttggcttggcacagagggctcagagatcagggaagataggtgggggaagggaagcttactagtatggttcaagagtctgatggaggtggagaagaggcggtgagagaatggaggtccccctggaatagcttaaaaatgtaaagaatgggctaaccattatgcttaacaaaaactgttctacgaaagaggtttgttggctctagatgttaaatttttaaatgattttttaaaaaatttaccctgatattgtcaatcctcttctcacaattaaacattgccaaaatgtatttgtaattttagttccgaagagcagctgacattattttcaattatgtcatttaaaaataaaattgcaaaagtatagattttgatagcctaattagtgattttgtggaagaaaataagtcagaataatcttatggccaggcaagaggtcactgcactattatttattttattatataaaattattttaaaatattttcttataatttatgttgtttggatttatttttcatgtgtcacaatttattatatttcatgatcaataaaatattttataaggggtagattttacatgttggtattttcatagtaaattttttcttgctttttaagcaaaaggcccccatacaaaccctttttgtggattaggtagctacacagggagcctgctggtatgatctggcagagggagcttttccaagctggtgacagaaatcagggaggggttgccatgttgctcctctggaacttttacttagacaaattaatgttctaacttgttgaataaattattgttgcctcattggttctgtattagcgcttcacatctgaatatccaagcaaattatttgcagtcataaaatgagaagcaaagctgaaattgttttctctgttggcaaatattcttggtacacattctagtatgtgtgttacttggtgggtgttgtcctattttctattacttggtaagtgaagatatgcttggataattgaagatggaattattttactttagaactgtgaaaaatggaatacaatagcaaagatgcagaagaagaaactgaagatgaagaggagggactgaaggaggcggagggggaggaacaggagaaggaggaggtaacagcaacctcagaaacagacgatgaccaagaagacctcccttctgtcttagtgcctacagttaacattcgggaggagcggctcatcaatttagctgaaacaccagctttcctctgtctgcatgaggtatgtttctctttgtatactattactagagtgtcttagttagagttttactgctgtcaacagataccacgaccaaagcaactcttttaaggataacattgaattggggctggcttacagtttcagaggttcagtccattatcatcaaggtgggagcatggcagtgtccaggcagtcatggtgcaggaagaactgagagttctacatcttcatctgaaggcagacaggagaagactggcttctaggcagctaggttgagggtcttaaagcccactcatacagtgacacgcttcctccaataaggccacacctccaaatagtgccactccctgggccaaacgtattcaaaccaccacatagagtaaaacctaatgttcacccacttaaacatacaaagtctgcagcactgtcaaagttctctgttgcacacctcctataggcctcaatcatatgaacaagtggacccagcctttcttcctgacctttccttctgcaccgatgcagtgtgtaggctcctttattattatgttcattaactttttattgattctctgtgatttcacatcatgtaccccaatcccactcacctccctgtttctttgtatctgttctcccccccccttgtaatctcccataccccaaacaaaacaaaacaaaaaaacaataaacaaagacacatcttgttgtggaacaacagaataccctttgtccttatatctttacctggaactgtgcattgcaatgcgtcattggtctggttccaggcctctggcttctactatactgtcaacactggattcttaccaggactcctcagatatcctgttgttgctctgtgtcatggagatcctgcaacttcatgcgttccagcaatccggcagttcatagatggagaagatgttggggtgagcctgggtggtagtgagttggccagccagcagctctccttcacccacgctaccagggtgagctctctagcactgccctttaatgtaagaccacataccaaaagcacaggcattaattctgacagttaataagtgagacgtcaggaagctaagcagaagcttctctgatgagggctgagtgatgacttaagtactggtatagggtaggccagcaggagttggtcacttggttaaaagatggtacttttaggtttctcccctatttactatcattgctttctttttgatattgacaaaaaactaatatagagattttaggcttagatttttcaaaaaaaaaaaaaacaacctccttttaataagggtctcaaatgcttcccccacttctagcccaccatccaaaggtatgggagaaaagatgataaataggacaagggatgtggatctttttagaagttgttctttggggaaattccaatctctgtttgtgaggataccaacagtctagttcagtagtctcaggatataccaaacgtgaatcagcaacggtggtatgatccagcagaaaccacaagagtcagtgggagagactaggaccagctgggatgccaggagaagttctctgaacctttcttaatgaagtgaagatcagtgaaggagaaagcaaagaaagatgcaagaccaacaaaacattgcagggccagctatgcaagcacctcactgtccgcggaatccatttatactctcagcaaatatcacatgtcctctcaggagccttgccttaataaaacactatgtgagtctgcaagacatgatgtatccagaaacttccacattaggagatactaaagactatacatgcatcttattcaccctaaaattttgatctatttttgatatccattgaggattcatacataattactcttatgtcagttgctccatcatggtatctgattccatcattctttccgcacctgtgagtatttttgctgctgctatgctgtatgattgattgaatccaggatgtctcacatcctaggcaagcattctcctgtatcttcaactcaaacgcacatttttgtttcagataggtctctttgttttgctcaaactggtttcacacccctggattaaagtgacccttctgcagcagtcttttgagtgctaggactatagatccacatcaccgagcctagttcttcaacagctgtattaagtggctttccatatatataaagaacccttaccactttctgacttacttatttgtctacattcaacttaatggagaaagaattcattaaggtgcagtagtggggcaggaacacgagacagctggccacatcacagccatagccaggaatcagagagcagcgaatgcttgtgttcagctcactttttccttttcatgcagttcgggatcgtagcacagggaatgacaccacacacacacagtgtgtatatgtgtgtgtatatgtatatatatatcataattgttagctatagttttatttctcaattcttttttataatttttaaaaaagatttgtggggatttaaaaatttttgcgtttagtttttcttcagttgtttaaatagaagctgtgtctgaagaacggtagattttggatcccagctgaaagaaagctctcgggaccagctgccaaacatggacacttccatgacactgaaaatacagaagcacccacagatgtactgttgctagcgctgggcctaccattggcctgcagtgctgatcggcagagcgcacagctttcactgtcatcagacattggctgaagtgtgtgtttagtgtggtgttcaaggtcctctgcaaattagaaccagactatttttcaatttaatcattcacttaggccttaatggcctatttacattggttctcttagtggagactttctgaaatctagaggtggtaaattcagaagcctgggaaattaaaatatgtgatgtaagagcatttcccaaaattccgcctactcacactgccacataaaatctgtgccatttcaacttagactccaaatgaggccctccttcggtagaccatactttgtcaccctagcaagtatcctaaccttctgaaccttcctgaaccctcacttcttcaggacactgcctgagcacttagcttgtgggaatgtctctagattgccaactctgtagcattaataggtggacattacctggttcttagtcaataaccaatatttactaaatatcttctcataaggcactgcacagaaaacttaaaagttcctctctgatattatgactacataataagatcatcgaggcaggaactaccctgctaagcaggatcagtgttcaaaatgacatttgggagttgagccatttgggtccatcagtggcctgtgagctaaggtggacagatagctgtctatccactaatccactgatatataagcatgaggtctggtgctctacaaacttttctgtcccattggaaagttgtctgctttatatatgtttatgtatagcatatataaagtataactcataagtatcagtatgctgctccttgaatcttaagatgctatacagccagcacacatggatcagaatttgttaaggctccaaattttgcttcccttctgagttctcagtgtcagtttgagagttaactgtgcactttaaatggccctgaatttatcttttttccaccatcatgttcttgaccagatcaaagtatatttctagcaacctagaagcttctctgggacccttctcaggtgtcactcccaccaaaggcagcccatgttcagagttgccactcactctgttggttagcgtcttcctaaacactgtgcacatagaatcatatgccatgtttttgaccaggcatcctgtttgtcattgaatgtgtgagattcattaataacactttgtgtaaaaacagaacgaccctttgtttatactcctgcatggtaactgtctttttttcctcaggaattggtgtgtgcctaaacgtgaggctgctatgtcatagaggaagtttataagcagcccaccggagtttttcctggggtgggctcaaccttagatgttgcaatgcatgcgtggttaaacctgtttctgtctgtgtgcactgaccctgactatgagtgtcatggtgtcgggtgtttcactctggcaaaatctagaagctataaaacacttcatctcaattccacaagcacaaaattcattttgagtattattttattttgcctgcctccctgattattctcttatcagacaccagtcagctccttcttcctcctttctttgcaaataatccttatgccaacagttaagcttttgacacagcagagccaagtgctagagaacaggaagcactaccctgattaggaggcccaagggagaatacacagactgcaatcaagtactaccgatggagtgtgtcaggatagcagacagagccctgttagctggggagtgcgggtgagtggcattctgtgggtgagtgagttaataggcttccctttgttggtaaaatgaccctccctagagcttgttttgtattaagctatccattgctttacttcctacaaaatgtataatgaataaagtgtttatagcaaggttttgtaaatatcttttaaaattctttatttatcacagtgggaaatggtttccacagttgtcttcaggaccaacacttcccaacaagaaactcgctgccacggtcttgttactggctcttttcccagctgcattggaaaagtttcttcactttgcctttcaccttttaacaaactaaaatataatataaaacaaaattcaacatattcaaagttggactagccaaggcaaccgaaaaatataagagccccacgagaaggcccaggaaccagccacccacttgtttacaggttccagggtcccataaaggcactatatggaaagctatagtatatatgcagaggacctggtgcacacgtgtacaggccctgtggcctgcttgagtctttataagttcatatgagctttgctcagttgatttagaaggccttgtttcctaggatcttccttcccctctgcctccccaactccttctgcctcctcttccctggggttccctgagctctgagagggggagttttaatggagacatctcatttggagctgtgtgttccaaggtcctctctgtactatagagccatgggcctctctctctctctctctctctttctctctctctctctctctcatctgctcccgtctgctgcaggaggaagcctctgtgatgctgagagcaaggcactgatctacgagtccagcagaatgtcattttattaatactttatttttttttttagaccagtactatatggtgttgccctaggtttctgggatatttagactctagctcctcatcatccaagcagtaccaagtatgggttctatttcatggagtgggccttgagtcaaattgttactcccacaagctttgtgctaccgctgccctagcatactttgcaagcaggacagattgtggaacaaaggtttggtggttgggttggtgcattttacgcttctcctttgggagcttgcagagtacctttccatgtcagaaatgatagaatacagggtaaaggttctgtatcgacaatccttaacctccccatggtctgtgagctgtgtgagtgttcccttcagcaaagaggcttgctgtcagtttgtagagagcaacctattgtcttggcaacagtctgagttgtttggggatttccatgggaccctttctgtcaacaacacaagcgaatgaacccctgtccctgtagctgaagctttagttggtaccaagggatggatagccatctccctctccctcgttatttggcggcttcatgaggattgccttcatctatcatcggaagtttccactgtgctaggtttccatactgcctgcccctcaaatgcccttcagttccttcctctccctcatccccttcctcaatcccatcttcctttcacctttctttcctacctgctactcacattctcatcccctgacccccagctccagtccactcataaaatctgttctatttccccatgctgggagatccgcatttgctctctagtccctttgtctatgcctaacttctctaggtctgtggattatagcttggttatcatttatttatggctaatatccagattaagtgaatatataccatatctgtcttcctgggtctagtttaacctcactcagggtgatgtttttctaatttcatctatttgcctgcaaatttcatgatgttatcttttaaagtgccgagtaaatactgagttttgtaaatgaacgttttctttatccatgcttctcttgagggacatctacattgtttatgatttctggctgttatgattagaacagcaatgaacatggttgagcaaatgtctttgtggtaggatgaagtgtcctgtgggtacatgccggagagtggcgcacaggtggatcgtgaagtagatctattcccgtctttctgaggaaccaccatattgatttccaaagtgactatacaaattgtactcccaccagcaatgaagaaatgctccccttgttccacatcctcaccagcatgagctatcacgtgtatttttgatcttagctgttctgactggtgtaacatagaatctcagagtcattttgatttgcatttctctgatatctaagaatgttgaacacttttaaaagtgtttctcagccatttgagattctgccgttgagaattctctgtttagatctgtaccccatttttaaattgggttatttttatatcaagtttcctgagttctttatatattttggatattagccctctatgagatgtgtagctggcaaaagagtcttcccattcagtaggccgccgctttgtccaaatgacagtgtcctttgccttacaaaagcttctcagtttaacaaattttagttgaatgatacattggctaggaattgagataacaaaacaattatcttaatctacttagagatatttatatactgcccactgcataccagtatgctgataggaaatgtttattactgttattattaaagctacaaaatcattcctttatttttttagttctcttttaaggattaaaagaattatttatgtatatacatgcaagcctgtgtatgtgtatgccacatgtatgtatgtatgttcataagaggccagaagaggnnnnnnnnnnnnnnnnnnnnnnnnnnnnnnnnnnnnnnnnnnnnnnnnnnnnnnnnnnnnnnnnnnnnnnnnnnnnnnnnnnnnnnnnnnnnnnnnnnnnnnnnnnnnnnnnnnnnnnnnnnnnnnnnnnnnnnnnnnnnnnnnnnnnnnnnnnnnnnnnnnnnnnnnnnnnnnnnnnnnnnnccctatggagctggagttagaagcggtgtgaggaacccaatgtgagtgctaggactgggatcctctggagagcagcaaatactgccagcctctccacctctccagggaggccacctctccagcccctgtttagtttaattctctccctctctctctctctctctctctctcttttttaacggggctgatgactgagctcaggaccttctacttgccaagtaagtgcttttcagttgaactaaatgtccagcttccttcctttgttttaatgttctcttctctccccccccccccccccccgttgctaaagacaaagtacagggtcctgagcttgcttggcaagtgctctgccactgagctcaggctccagcctccctccttcttttcaaacagtccctgtgtgttttctgtgctaaacaccatcgggcgcacagacagaaagcccagggaatattcctgtcctttgcaaggtttatttgggaaaaggtaacttgaaatgttaaatgccaacaaagggtgacgtatggttacagagccagaaggggcagttttcttagaagtcactgtgggaagagatgatggagaaagggttttgaagtcagtagacgtaagacgagcggagataaatcagctctacctttgaactttgccctcactgttcacacacgtacttggcacatctccagggtccaaggcgcttcagagcaaacttccgaggacgcctttggcattctcccaagcctggctctcctgcattgtcctttggctctcttgtgaatgttttgtctggccactgagacaagacacacgaggctacaccaaggcaggtgtggtgggcaaaaggagtgagcttgtttaggagagacactaagaaggtaaaattctggacttcttatctgtatagatggggataagggaagaaccgaacttggcattcggaatgctgaactaggaaactgtctaaattattgggccagaagtgctggagttaagaaaacaccacagatataagaggagtgtctggtgtgtggattgaagcttgcaaacagtccctgactagagggacaggtgtagttagttcttgatccgtgctttgtagaaggactacagtttgctacttcagtgtgtctaacagggacgtctgcattgtggggatgaagtgatattgtcattgtgtatatggttctgtgcttcacaaatggttgcttttacacaaaggatagtttttatacattctgttctccggaggctggatccagataagtacattcggaagttttcattgatttctaaaatcatcatcatcatcgtcatcatcgtcctcctcctcatcatcatcgtagcagcagcagcagcagcagcagcagcagcagtagtagtattttgggactctctgggactaccagtgcttcacccattttctgggttcaccatctctgtagctttactgatgagattcatgatacaatccctaaaaaaatttaaaaataattttcaaatagccaaaatatctttttcttgttttatgccttaattaataaattagctagttgtaagcaggtaaagatatgactctcacccacaatgagcttattgtcaaaggagtgttaaatgtatgatttattttcctatggattctgatatgtcatcactaccatcctacagctgtagcttgtccgtggttacatacatgcacacgatgaggaaggaagcctgtgttccatgtcttaccttagcacttagacttgacatcactcatgattcacactgtaaacactactattttaggattttacaaatttacttttaaaataaatactgtataaatggaaaagataaatgtgtaatgttcttgttatatgtttctaatccctttcccttttttagttgtgacacctcactaatagtcatacttgaaggatgtgagtgttttttaatgtactagtttcctttctaaaatctttctgtaaatatcggtattgccggcatgttttcactttccatcaaacatccaggcagcctcacaaaagcaacttaagactttatgtatctggtaagaaattttaagcagacatgaattcaccacactctattgactactctggtagaggtggttttgctgcgttgttgttgttgctgctgctgctgctgcttttacatttgacagtaggatggagattttaaatgatttccattacagaagaagaatttgggatgaagcaggaaagcacttcaggatttagatatcagcacagcttgtgtccactcttaaggataatttgcattagcattatacaggccctattgctccttataaagcacattgctacctccaaatccagtcagtaaagtgtacactacagaacagggccaggaaaaagaaggtccctcgtgaggtggcctcactcttggcacctataaaatgattacacgaagactggctctggccaggaatttaggctgttatcagaaaaacaatctggaaaaaacaacctgattaaaaatgagcaagtgggagtcaaaatatcagtaaaaatcagggcaggcaggactcagcatttcctcccatcctccccgaactgctatgttacttcctcacacttaacatcttccctgagcatctacagtgagccctgcccaagaataagacacagggaaggatgctggccaccatatggcccccatcagcatggattgttttcctctcctttgctttatctgtgccttgatgtttccttacataatttaagcttcccatgtgtgtgtgtgtgtgtgtgtgtgtgtgtgtgtgtatactggtgtgcatgtttttaagttcaatagttttttttgttacctctaatttttattggtattttatctgtaataagaacttggttgaacattaaaaataatttccttgctgggtggtggtataatgcgataatccatctactagggaggcagagacagaaggttcgtgttcacaaccaccctggccaatttaagaagatcctgtgtcaaagtactatagctcagtgttaggatgcatgattgtatgcagtcctgggttccaacctcaggcttgaaggaaaggactttaaacttgaattctgtggggattttgttggtttttttgtttgtttgtttgttttagtagttattgtaaacagatactgcttttaaaaataaggaataggaaaaataatctatgcaattattctctcccttaatgaaagaaattctaagttggctttggaaagctatcacactctgacaatgtatatctcgtgtaccattagaaccacatattgggaactgaagatggagtcttaagaattgaaatcaagaaaacccctttcaattaaaatatatgaactggacaatgagaaagcattggcgtccttaggtaggaccttaggcaataagcaaataagagtagggtggggaacgtggccatctggtaaccacatttacagatgacactagttaaatgagtcaataccagaagagagtgtaagacaaagctgtcagtctgcacaacaaggcagggttcagtggctgagcagaagatggacccagacgaggtctttagagagcatagtattagaagcctcattataaagtgtgtctcagtcaagaggttaaccttttcaactaaaaccaatctttaacttctaaaatatgcacattgcattaaattcagaaggctcaaaaccatacacaatgaagttagctgtcaggagcaatctaagaaaggctaaggctagcaggtggtcttcctggaggtggcctgcccttttttgcatagcctaagatagatgagctctgagaggcaaggtcccaagaaacttctcctcaggattgcttcttgttgctggtacattttcctattactatcacatagcctctggattcctggcctcaggccacactgttggacagatctcctgcagatcaacatagagatgaactttgatgaattaatgctgtttagataaattagtgattttatagagttcttgatttgatttaaatacttttaggaagaaagcattaatagatgttttggttgtttgctagaaagatgtaacaaagttagaatccagaatagaatgtgcctgcttctcatacagtaagtaaaggctgcataataagactacaatgagctttcatactacactaaaaggagaggtgggtgtgggacgaatttgtgttcaaggaaaagcatttggattcaaggatgaagccacaggtgtgcaccatgataaggtaagggcatgtgaaaactgttgctttgaacttaaaatgagcttacagaaggaaacagggctctgaacttttagtatcaacattcttttgttactcctgttttgtataacatcttatctggggtaattttctaagaactttgtctataaaaagtccagagaaaagaaataaagatgatgggtagtttgtgggggctctactccatccatccatccaaatgtatatctgtctgtatatgtatatatatatatatatatatatatatatatatatatatagatgtagatgtagatgtagatgtagatgtagatgtagatgtagatgtagatgtagatgtagatgtagatgtagatgtatatatgtatatatgtatatatatgtatatatgtatatatgtatatatatgtatatatatgtatatatatgtatatatatgtatatatatatgtatatatatgtatatatatgtatatatatacactgaagagttaaaagaggtcagaatttcttgctggacatcctcaccagccacagataagttttgttccatcagaagtattgacccaataaattgcccagtcactgtcaccagacctcatttgctcccattatctgcctttcagacctggaaaccctatagatgctgggaaagtcactgtaagtcagcctactaccccattccactatctgaaggccacccctcagagcagtcttgggccatcctttatatagatagcataacaggaagtctatgcacaaagaaggaaatggtattctaatagccacacttgcattttacatatacaaatttatttttgtattattttatggttcaaatagtattcagtataacattttaggtagttctctgtcttgagagttttggtcattttcaatcttcatgtttcaattagacacaataataaatcaaataactccgttcaaaccattttacactgggattatcagattgaaaggataaatacctaacagtgggttgccgggtcagtgggtttatttatttttgaatctttatgattcaaattttttaagtttatagtagtgctgagtatactcttgcttcacaaggcatcttctgggacatttcctgttgtcactaatattaattggggtttttaaccccaccttagattatttacctcccagaaaaaaggcacaaaaacttctaaatttataataagtcttagacgacactagagctggcagatatctagcctctacgctattagtatctacacccctatcaataaccctgagttataacttgccatgttccacctgggccactctttcttcaattggccagccctcatggctatgttttcatgactcactcaccccacttacgtctttccactttctccctccttctcctcttgtgtctcagaccccaagcccaagaatcgaaattctacctacctcttttctgcccagctataggccgtaggcctctttattcaaccaatagttttaaattaaggagtaagtttacatatcatatcttggtatacatgaggatttcctggtgcctggaggcaaccagaccttgggggccagtatttatcattacagttcatagcaacagaccaagtctcagcaatttccaccaacaaaactgaaactgtgtgttcattaaatagtgaacttcctcttcctatagtcactggcagctacctctctgtctctcttctctctgtgcgtgtgctgcttctgggagtggaatcacagaccgtttctcttttcgtagctggtttacttcacttaacttggtgtcattaaggttcacccatgctggagccagtgccagaatttcctaagactaacaatgccttgtatgattatcagtgaacgtgttatcttctctggacatgatatacaaatatctctccaagatctcatttttaaaacatttcaaacattgtattatatatccagaaatggaagtgctggattatagtctgtgtacttaaaatgtgtcttcattgtcgagatgccttgtctaatgattgtaacaatttacaactgcaaatgggtcccccatattccaactgcaatgcttctttttaatatatatttttttatttttgagatgatagtacaattacatcatctctccattctctccccgccccaagccctccaatgttctccccctttcgctctttcaaattcatggcctttttttttttttttgcctttgttacattgtatgtgtgtgtgtgtgcgcgtgtgtgtgatttttgtcatagtccttatatttaccttgaagtgagtggaatggaccttttgtttatatatcagactattctgaaagagagcatataaggcttgagatgtagctcaattagcagagtggttgcctaacatgcataagccctgggttcagtactgggtatatctggcacaatcacacataactgtctaatcccagcatttgggaggtagaggcaggagggacaggtgtttaaggtcatcctttgcttcttagaaaacttgaggccagcctggactaaatgagatctgtgtgtgtgtgtgtgtgtgtgtgtgtgtgtgtgttaacatattaataggaaaactgaagtatggaaaggccaagcaatcaggagctgagcagcacaatcaccacagacattttactactcacagtttctaagaggatggcgccatgtcataaggttgggtaggggtcgggggcagagtatgagggtaagtcaggaagcagatgggaaggaaggactgggaaagaaactttattgtggcttctgagctagggaacaggcgagacagggtgagcagactcttaggacagccggtttgaataatctccgtgggttctggggtgttgtgtgcaggccctggttgtctagtgtctggctctgaggtacttagagcaggtagggtgtataccctggattagttgggttgcatttgaaatgtgtgactcggaggagattcgggggtcaaagggaggaagaaatgagagaagaaggaagctaggtgactcaggcatatcatggttatcagcgtgtacagatgaaatgcagccacctcatgcacaccggacagatatgacgcatcagcttcgtagaaattagacatgtggttaatgtggaggcacatttgtgcttcgttgtgtctgtgtgtgtgctttcttaacattctactgcccattggttggcttgaattcttcttatacattcataagaattctttgtatttatatattacgaaggctgtctcgactagtgtgcattcttctagtttatcgaataattgtttttagcttgctcctcgttgtttattccctgtgtggaaattcatctttcaatgtgcttggatcaatctatcgtttctttgcagctctgggattttgttatactttgaaagacctttgttactctgaggctatgtatttgtttcctgtgttttctcatgataccatgaagatctgagtcatattttaacctttgccccatctggtagagtcggtgtggtggcaaacaggaacagcttagaacccaaggccaagtccattatcctctgtacgaaagtactgttcctattcctgcccacgtcaatcaattggaggcaaacagggacacctcggtcggggaaaaatattagtgggagggcagaagaatcagctggtattaaccctcagaatcagaagatagtgttgctacctgtaatgggaacaactgcacgggcaggctttgaacagcttaaatcttaataatctgatggggaacgatcagttggtgataaggtggctagacagagctgctcttagttccagctctgtgtgctagttgtcaggcagtcgtttaggttctctgggccttgatttagatcattgatacagtttttcagttcaagttccttcttcacggtggcctcattgcttactgcggtaatgcccatcatttctggattcttttggtcttttctctcctcccccatagaattcatatataagtactctctgtattcacgtcaccatcagccctgccccccatcactatcagcccctcccccaccaccatcaccatcagcccctccccctccatatcactatcaacctatccctctctcccctgctccctccagagggaccactgggagaaaccttgcataggctatgtgtgtgtgaattgcttacaactcaacattttccttcactggccttgatacacagcagggtgtggagggtatgtagattcccctgcagaaagccttgaaaagccttgtgctaaggtgtcccctcaggtaaagaaggcgtgagttccacggctcctcctgtgcaaaactccctaaaattcctcatcagcacgggtgtctctccgcatccccctcagacctgtttgaggagctccagatgctgcctccccgccttgctttctggctccacccatctccccttgatgtctttggccacttcactgttttcccacccagcatcccgtggtcctttccgggtccaggcatagacatgaggaactgagggcagcaggaggaggttgtaaatacttaaagttgaagcttcttttgcttgagcattaagatcgccacttcctggtcctcaacagtcaaatccctcagcaacccgatctacggttccttctgtccttctgttcctgtgcccacacacttcctgcgttccagaacacacttgcacagcccggcttgctcctgtttgcctacaagctcaggattccccacttcactgttgcctttctcttctcctcttgccctaaaagcaggcccgtacttcagagcagccgtttttcaaggccatctggggtcccaggttttgttttttgttttttgttttttttctcaaagtatcttccttctgagcagagctggaccttggctccttctgtaacctcgcccctgctgggctgccttgtctcccacccacttctcttttctgttcttaaagctaatctgaagtggctttggaaaagtgagagagcaggaagcaatcagtgttccttgcaaactctacctgcttggtgtataactgtgataggtttcagaagagcacccacacacgatcatcacttttaaaagcaaatgaaaaatggagagacttcttccatctctgaatgctgtttccataggaaagcaacccatgttctccgtgatttaaaccttttcagttagaaccatcacacagctgtcctattttactttacccgctgacccaaccccgccaggaaaatgtgatagaggaatgcttgtcaagtgtttttttctcagtgaaattaaatcccccccaggtcgagaaaggctgcactattccagctggcacaggctacagatctgctcaacttcactaaccctgctctctttgacacccttgacatgtctgcagatggatggggccattgcagacacgttgagaacctctacccaaggtcagcatgttagacaccagcccatatccagagtgaaggtgtctgtcctgttcaacctgcacagatccccacatccacagggtccctctgggtgggtttctaatagttggatgaacagggttttaaaaattgtccgaatgtctggagctgtggctcatcaagtaagaacactgcctgctcttccagaggaggtgggcacagttccctgcacccgtgtgtaggctctcaatcctctgtatctccaggcctaggacatacaacaccctcttctggcccccaggagcactacatacgtgtgtgtgtgtgtgtgtgtgtgtgtgtgtatgtgtgtgtcacacacacattcaagcagacccttatatatataaaatacaaataaattaaacctcaaaaaatttcctcaaatagggtagaaaattttttttaaagaaaccctcactaataccatttatttttcagtgaaatgctttataaaacttgtttttaacagatgaaaataagaactttggcatttgcatgagaagactttcggctttcagatatcttgcaaagtactttgtgtttgtgcagaatgtgtctccagtgaatcctgccacgtaaccatggagcaagtagtgtttggacagcgtgaggacttgtttgccttttctgtcagcaccgtcataaatttgacttagcctcaggaagacaggatttaaccgctgggttaagtaggaacattaacacccttgaaaatacgttgatttaaaaatatctcctgtctaaaacattatatgatagttttgataagtttaatagtataaataatttcagctcagacaagatataattagaatttgttttcctttttctaagttttaaaacaaagtcagatgaggaatggtaatgagggttactgcatgaccttttccatggagaattagacacttcataagaaattcaccaggaatgtcaggaaagctgaaatgaaggctggcctgaaaatgactgacagttggtaggtaacatccctccaagggaaaagggtcggggaggggaggagnnnnnnnnnnnnnnnnnnnnnnnnnnnnnnnnnnnnnnnnnnnnnnnnnnnnnnnnnnnnnnnnnnnnnnnnnnnnnnnnnnnnnnnnnnnnnnnnnnnnnnnnnnnnnnnnnnnnnnnnnnnnnnnnnnnnnnnnnnnnnnnnnnnnnnnnnnnnnnnnnnnnnnnnnnnnnnnnnnnnnnnnnnnnnnagggagagagaggagaggagagagagaatgagagtcagttgagtgttgtgtgagagtgtgtgtgagtgagtgaggagtgagagaatgagagtcagttgagtgttgtgtgagagtgtgtgtgagtgagtgagtgtgtgtgaatgagtgtgagtgagtgcgtatgtgagaatgtgtgagtatgtgtgtgtgtgagtgtgtatatgtgagtgtgtgtgtgtatgtgagaatgtgtgagtatgtgtgtgagagtgtatatgtgagtgtgtgtgtgtgtaaagcactgtctccttgggcagtactcaccacagcaaacagaacacactggaagtgtcctgggagagtgtccagtgcaggatttttgaactgccagtcagattcattcgttgtcctctccattgcagtattagtactatggaaggggctagaagttgaatttaggctgcccctcatgtggaaagtgtttataaaacacttgtgaaatagttaattatcactattatctctaaaatggagaaagggaataaaactagtgcagttaaactattcataatcatagccaagctgtaccccagtgatactaaattatttggcaagctagatagaatgttgttaacaagcttggaggccttttctatgaggttcagttcttgcttcttttgagctctgcctaacgtttggctgtgggtccctgcatctgtttctgtcggaggccagatgaagcctctaatgatgattatactaggatccagtctacaagtatcattaagaatcatttcattgatttttttttttttgccagctgtgtctggttctctcctagatctgtgggctatccagtgcccagcatggacttcctcccatggtgtgggtctcaagttggacagtcattggttggccactctcacaagttctgcatcactttgccccagcacatcttgcagacaggacagactgtgggatgaaagttttgaggctgggttggtatcccagtccctgccctccaaccctcacctggtatcaaaggatgaccgatttaagctccgtatcccccattcctaggagtcttcgctaggctcaccctcagattcctgggagtttccattgcactaagtctctaccgcacccctgaatgctctccactacacctgtctctcccagtacaaaatttgtatagtgtagaattccatggtgaaacactaaactcttttttaagacagcaattcatttaacaaaagaacactgctaataccatatgatacctaagacatgcagcaagactgaaacactaaactcttttttaagacagcaattcatttaacaaaagaacactgctaataccatatgatacctaagacatgcagcaagactcacaagaaagcacttttgctggcacgagaagcaaatctgaaactatgattatctgggacacatatgcagttgttccagtgggagtaaaattctgcactctaatatagacacatccctgagatctctctggtgtgattttaagatggtggtatcctggtttctccttatttccaacctctctgtgaggtaaattggtccaggctcctgcagaaaagtttgtgttctatgtctacttatatatgtttatcttttatggtcccagggttcattacatctgtgatgagcagttctcaaatgcatttgtgaaccccaggtgccctcccccaactccagactaagccaatggcagtctctgcttgcaaatatttgaagtccactttctaagcttctggttccatcactcactctgccccgcttcttacacactcctcagacagattccctctgcagatgacgtcctagttcagtcagtgacagcaccatctttcaaggtcactcagtctgagatactgtagttggccggggctcctctatttgtgttttactatccaccactgacttagctgatcaaatcttgtgagctctacctcagaacgcatggatctcactgcgactgctgaagttagtgctctcaccatctctccatgggattactgtaagcactatcatcctggaaacccctgtgtccatggcaagacagccttccatttctaactggaggagatgatggccctcctctgtagacagccattggtctcctgtctgctcagaatgaacggcatccctgggtataaggttcaggaggcctaagtgccgtggccccaccctctgctcccctgcagacctttctgctttctgcttgccctactttcttgaccccagcagactagactctgcttaccacacacgggtcccttcactgactctcacatgtgccagttgctctccaactccaaactttgatgcttcttgctcccttggcttggcacttgctttcctcaggcattttctcaggtttccactctgttgtttacagatctgtttatctgttgtcatcacagagcggtctctcctctgtgccctgtactcattagcttctctgaggtctcccctctggaacctgtattaattagcttcacttcctctaatagtctcttacacttgcttgctttttttgtcatgaaagtttctcctggttgaaagtcagaatgcagggtctatccctgtggtcagaggtgtgcctccatcctccaagaagactttctggagcacagtacaagtgtctgctaaatgaattaaggcaaaccacacacacacagacacacacacacacacacacacacacacacacacacacacacttcctatctctataagtatttggtttttaagacatttctggcttcctagctttagtaacataagcagctattgaatgttggtttattttaattaggtgggcaaactattatagccaaacatttgtctttgagtttgaatgactaatctttggtgtgctaaaacccaccagtaacactagtgatagaagagaccgagttaaaagctacaaagggaaactgaaaatgctgcctgagggtgggtccccagcagtctaaaggaaatagatgatggtgtcctctatttgccttgcttattattatataaagaaataatactcagtgtttttaaggactcggggatgttatctagattaggtaaacacaacccaaccttttagacagtaacagatatataaatatcattttacacatgctgtttccacatcgaaggatagatataaagattaaatcttttattttacaaggctttaaagaaacattaaacataaccttaattatacatcaatgaaaataaatcttaaacaagagttcatggaaattgcatatatccacctatcttgaaaacttatcgaagagtgaggggcagctactgaaaaatccaggtccagcccatcctgggattctaatgctccttgagcctcgcacacgagctctgtccaccagagaactgaggacattcgctgcgttactacttttcagagagatggctttctcgtttcgtgacaggcaaatcaactggattcctaagaaattagttccacttggcatttttaaagaataatgatgttcagcaatagtgatcattaagatcagtgctagccacccaaatgaagccaagactctaaaaatacatattggcaaatagtgtacattaatgaacatcagcatatatcagtgaattgttaaggctaaggactatttcaataaacagattagagattatcaaagtctacaatatatttttaaatgagtgacagaaaatgattcaaaaataaatttctgtgttaaagaattattagaagaatatcatagactataatagaaaacaacatttggatccattggaagtgcaaagataaagtatttacatggattcattgttaccctgagaaagacacactcaggatgaacacatagtatttttgctatggtaaatcaattttcattatggaaatgtcattagacttatatggctacatataataaacaggatttgaaacacatgaattgtataatatcaaaatcttcttagtcttttttaaaaagcaaaaagaaataagattggttactgccacttacattcactgttttaccaagtaggtaaaggctttaaaatctacgttatattttggtcatttaattcagcatgcatttagcttacgctggcaatttaattatattatattattaatagcttagttgtcactgtattcacctgaaaacttcatgttgcatgtttcaaaaatagtatcttgctctttgtaaagtttttttttttttttacagtggctacatgtttgaaagtttaagtagtcaagacaataaatatcctccctagttatgttttaaaaataactaaggtggaatctttgtgcatatatttcaaaagcttggttagtatattagaagctacaccaaaacttaaagatcaaagttattgcttagacagtgcatgttgtacagtcagttactccacgtgactgactgcatgcggcacttcagattccacccaagagcacgtttaagtgtgcggctggttgtttctctctgagtgaccccttttcacaagaataaagtgagtgaaactgcccccagagccttttaatgtgacccttgacatccacaagtaaggaattccagggactcacatttggctaaaattgtatatattctttgaatttctaagaatgaaataagcaattgactgcttaggattaaaatgtataatatttaaactaaaattccaaaattcatcctaataaatacatttgttctagaaaagtcagcttcctagaacgttgactcctcgacaacagtattgctttgggattaggattggctttcaaaatataaaccagtgtgttttcccttaccatgcctttccccaaggaaaccttacagtagtctagcaccttacatcacaaaccattgtgcacagagagcagagggagaggataaagcagcttttgtatcgcggtctaacaggctataaacagtaagtgaattaccactaaaccaaagtctacagggtaacattatttttcaattggagagggaagagacatatattatgctaccacatttttaggtattttaatgccatattttgcattagatgaatacatttagctatacatattgtccctggcccccaatcccatccctgcccttcttcttgagaactaaaatgctttaagttcttcttagacgaaagataatactacagttcttggctttcagttgtacctggaaggactggtatattctcaaatgtgtatatttagccctagtgaaaataaaacttgcgtatatagaatctagcttgctgaataatttagtttttattataaaaataataaaaatattaggaaacttttcaactaataaaaatgaaaggttttgcaattataatgtataattgtcaatatttccagtgctttcaagcattcctcatataacagcaacataggagtctttttagatcttttcagctttattctaaaagctgtaaagctttaaaggaaatgtttagccataggaaaggaatataaactgagacatatggtaaagggctgaaggaattcatcgtcctcttagatagtgagtgcccagagagatgaacactagcaatttatggcttgaaattcttgggcctaatcatcatcttggcctgtttgaaggaggacttgtagccacctggctgtgcctggtttataccaggccaggtgccccagaaaatcccattacggacacctttgtatttctggtggtaatatttgccatttaagttggcagagagacatgaatcaaaccaccagcctgagctgtaatagagcccacagttcccagaggggtaccgatcgttgtctctgtctggggttgtgaaaaacctcaggtcatggttgtagtgtcgactgaaacgcaaggcatcccctgccgtgccattgtagttaccgatgtgtaatcggtatttgagaaattcattagccacataaaactgatcatacaaggcataaagtgtgagaccattaaagtcttcaagatctattctcaaaatcatttccttactcttggtcagaagatgaattttatcgttgcccagccaaaattctcgttcaaggtttccaaagccggctttgtagtctttccactctctggtgaagttggtgctgccatcaaggcgagcctgcagcaccgtccagcctccacccatggtctccatgtcacagtagacctcaaagctgctgtttctgtgatcaggggtaactctgtaggccccactgcttctccttcctagcacgtagtggtcggaacaatctttgtatattagatgttgaactggaagagggaggaaggaaaagcataaaagcatggggatttattagtcaaagctatgcacctcaaggactctcagactcaacagcaattggacaattcacttgcgttacagtttatgtgatagaggaacctggctctgatacactctcctgaaccaggctaacagatgctaactaaggcctcagaaccaactggtgttatcaagtatacaggactgccttgaatggcaatcctggtggcaacactaacagcaaagagtagtaagaataagtgtatgcaaggtttaatgagggtcaatgacctccagaaactctgccaatcactgtaacagttttcactgaacccacacagcagccttacgacgtggatatcacggccagcttgcttatacagttacttagtctcccggaagatcagggagttttcccaccgcaactaagtgttaagtgacagagctgggacagaaagccagatgtacctgacagagagttttactctcataaccattatattcctctgccttaacgttgagaggagtccaagtctcctaggatacaatcagcaattgttacagcagactttacagaaatcgttatatatgttctaaatgtcagccttcagtgcacagcactgttctgaaacccattcgtatttcacctgagattgacataaaatgattccagttttaaaagggaggggggggttctccaataatatggcaatgttatcctgaatttattatttaggaaggtatacagtcagccaatatttcacagtttggtttctagacgtagcagcagggtgattataattatgctcagtgtaatcatttggtggtttttgtagagattagagaccaactatttgttcccagttaattttaataaaatttgagtcaggtaaagaaagttcaatataagattcctgtaaaacacaataatctgtttgcatgtatttagaactctggagagtcccaagcttttaggagaaaagtaggtaacagaatatttttgtgtcattacaagttatatgccatgtcatatttaatatacaccttgtgatgtctcttaaacatgagtgtctatcttggtcattagtgataacattctatgacatgatgacctaccatctctagagattccaaatgaaagttatccctactatgtcccatcgacctcacagtcaggatgaacacagagggtgtggcaacccatccacaaaggtcctaggaatccaggaatccggacacagaaggctgttaggtctgtgaccttaaatagtgttaacattcactaactggaatggtgaggatgcatatgcactaagtctcaacccccgaagttctacacgtgtcctcatccccaccacacacacacacaaagagagagagagggagggagggaggagagagagagagagagagagagagagagagagagagagagagagagagagagagagaagagagaggagagaggagagagagaggagagatgcttccatgtataaaaatctcccattctcactagatatttgagaacctagcacagcagattgtttgtgaaagccttataaagcccatcagccacccaagatctgattcccagggacctaagcaagcagagccaggaaccttgccatacctgtcctgtgttcaaatatgtgttcagattccgggaggaatctgtttctgctcgtctgttggtcgacctagcagggaaggtctagagacttgcaagtgacggtctctaacgagtacaactaataggatttttgtacgtggatcatttaccatttctgttgtctcatttgagaaaacacttgtttctcctgccataacttaacaggtgaaagtctgactaacttatgctccctcgggttaatgtttatggccactatctggctatacagctttcatgaacaaactgtatgaccctcattacacctacccggctgtgactgcatgtgttcttggctgggacacttggaacacttgccatccaaactgttgaccacaacggttagatttgccactttgttgtccacgtagttctcaatgttgttcatatttaccagatggagcgtctccaggcgcccctgcagcccctggatctggtcctttgcattcttcagctctgaggacagcttgttcacctgactctccagttcctggactctactgtcctcggctgtctctgctccattccctccattcccgccgggatctcgatggtcgtcagcctgcaacttacagtcctggcaggatttcttcagactgtccactgcttccttgagggtccgcacttctttgagcacctcctccatgctgccaagctgccgcgggagctggatggtcagcgtgggcagggtgagctggaaggggcactggctcccctcgcacctcccgctgccctccagcctcgcggggcaggcagcctgggcgctggcatcctccagcccctcagtcaggttgtgctcctccaccgctcggcaggcagcgaggacggcagaactcagccacaaccaaccaggaagcctcatccttgcagtgcggcagcccagcctgaccaggcgctttaatagccaccgccgcctgactcaggcgttctgagttcccagaaaagggcgggcgcatttgcatcacagtctcagacgccacacaggaggagagggtcctcagcaagcgcagccagccaaatgctgtcatctcctgtcagtcaaaactatgcacaatagaatgcctgccgtgggtgccacgcattgtattcaagattcaccgtctgggtttttagtaaagcacaaggaaagtcttttgtttaaaaaacagttgtaataccagtgcccaaaagataccatattatatacttggtccactagtggggaaagagttggaacgtctaaatgtctgtgagcttcttcccactaaatgtcaccaaaatggaaatgattctgtttcctccctagtttgggaacctgttttctttttgaaggctagactttgtgtgaactcttaagtacttaaaattgcccctaatcagaacaaaggtccgctctttaaatggattctctgtgtgtgtctctcatctgtttgtaaaagggaagagaactggcagagaatacggctgttttctcctgactgtgcaggctatgtaatcgtcagtggttaaaacacttggaagcacgtcactcacacatcacaggcagtggctgtccttccccatcactcagctcaggagctgggggtctctcttaagttcattgtgcatactgacctcataaggtttcttattaaaagggattttattacttaaaaattatttcagcgtaactgacacagataaacccaaattctttctctgtactagttaaaggcactctgtaatctatctcttatttatttagactgggtctcaagtagctcaggctggccttgaactcctgatctctctgcctctccctcctaaacacagagatcacaggtgtgtaccaccatgtccagttctcatatttatatctctaaccagatttcccaagacttttctctactgcctcttaattctaactgaactactctcttcaaattctcagagcagggcaggcaggcgcactttctatctgagaagtctggaatgttggccctggcactgtctccaactggacataacacgtattggctttgctgagccttcatgcctgttaccagtgcacaaggaatttgaatattttttttctcctatagaaataacctatacagactgaatgtgcaaaggggaaatgtgtgtatgaagaatttgtcagacacgccttatgccttgtcttaccgcactctcgggctcctactttcccttctcattccatcccatgatatccaaaccgatgttagaccccatttcaccctgccctccttatcctctctcaggccaaggcactgccttgatgtaagggagaagtgaatagatgggtaatttcaaagagaggaagaatgacagatttaagttgtctcgaaaagtggacctgtataggattagattctggcaccttgttagcaagctcgggtgctaatctctgtttaccagtcaagaacttattccacttactgtatcgtcaccaccatgctgccacatatctacaacatgctcgccaacaccttgctcatccatccatggactcatcatattctagtgaccgtgtattctatatgaatacacagcattctcccgaggacgtgggccacattagtaaacctccaccaacaacagcaccaccaacaccaacaccaccaccaccaacaacaaatgcctttgctgttttagatactgaaggtctcctgttttcttcatgacatctcccagcctgtacttaggactttccaacgaaatcctaaacccgttgtaaacaggacagaagcacagctttctgactcctgacatgggctcattgttcatctctttgaatgggagattggctcttggggtttgtggttgactcttgagtttgcagtacaccacctaattctcagagtgaaagtgaaaagccactttgtttatccatttccttggcactgtcatatgatcttcaggattttcaacttaaaaaaaaatcattgtcccctgctggtgtggtgacatccactgtaatctcctctcttaggaggctgaggcagaaagatcaaagtttcaaggacagcctgagctacatacacagcaagattctgtctcaaaatacaacagatcatcactgagataatcaatttgtcctttggcgcttctgttccttcactgatggagcatagcatggccaactatcttcatttcctgtagttgtggtagacacaccctacgagtcaagctaggactattgtgttggatgactcaaaaactgtactctgagtatgcccctaaatggtcccgcagatctcagagttcttatggtgtgggtctgaaatgctcatgtgccacctgcttgatcatcagggtggcactactgggatgccctgtaatctctgaggtagtcctgggcaaagaaaggtctgtctttgagtggttggaagtttgctgctatagggcatcacaggacccccaagctcttatttctcctttcactcccagccatgaagtagatagttgtcaccatgctatgctccatcagtaaagggacagaagcccccaaaggacaaattatctcagtaatttattatagctatggaacactaactcagattccaaataaattgtatttatttttatgtatatgagtgttttgactacacatatatctgtgtaccatgtgtgctccttgaaggccagaagagagcatcagataccctggaactggagttatagatagtgagtctccatgtgggtgctgggaattgaacccaggtcctctagaagactagccagtgctcttaactactgagccatctctccagccacacaaataactttgggtgagtagacaaactttcaaagatgaaaccataaataactgaggactatgcatttttataaaatacttggctttaaattcttagaaagttctttacattttaagctggaataattaaattcattttaccaattttaccacttgcattccttagagctttattttgtttacatttggcattttgaataatatattaatacagatgtatatataatatataacaaatgcatatatttgtatgtcatacataatatgtaatgtgttatataatctatgtaacttcgattgtagaattttgcttaaaacattatttcagtattttagttcattgcctagttatggaaaaatgaaaatatcaaactaattctgtgctagtgaataaattatgcaacatacaggacttctgggggcctggctttctactcctagatattcaggattagaagactccaaaacctctgaaatatatattagcatgtaaagttttaataaacgtaaaaggtcacgtccactgctgctgataactaaggaaactggaataaatattgtatgtttaacaaccagtgctgaaacacctaggtggtgcttctcctaaggccttcactggaaatatttttagaaagttttacaaatgtaacattctgaggtgaagccctgacttactgtgtttctgctttgatgttttctgtcactggggctgcgtcctgtcacctactcactgatgatccttatcataagctgtgaaacttcccaactcgtttctcccctcagcctgtctgtctccgtggcttgtcacctctcctgcccctatatttgtcacagaactgttctgattgtgtttacatgaatgatacgggtgtggatcctggtcctggatcaatgaatcaattgcagtgatggccactgcagacaaaaatatagacacaagttttatcagtcacatgtaaatttaaagtaaataccttgttactaagatcatctcagaagatacctagatgtgagaaacagagcattgtgattttagtcagtgaatcttaaggcagaatgtctgctgactctcaggcccttaacagcatcttggtggctatgcttggcattgtcacctggcatggggggaaggtcaccttagagatctcctttacaggtgagcctaagtgtctgcccagtctctggtgtcaatagaaaagatgatgcctgtgtgtgttttcagacgctcatttcctccacagggctcagcactaatcttggagataaaggactttaaaaagaaagaagatgaaacaaacaaaaatggatgcattgctgagttcctggtggggtgggcagtggcttaaagttgggagcaatgattttcaagcccgagtcaggtttgggtaaaagtgatttagcctttaagtgaggttcactgagcacaccctccctgtatgtccctggctccatccaccatgtcagctttagcaccactatttaaataattgttttgttttcaattttgtacacctctctctctctctgtctctctctctgtctctccctctgtctctctctctctctctctctctctctctctctctctctctctctctctctctctctgtgtgcatctgtgaatgcaggtacctttggaacccagaagacactatctggagctggagttagaggtgcttgtgagtcacctgttgtgggtcctgggaaatgagcacagggcctctgcaagagcacagtaccaacaccctttgctcaccctgttatttttgtcattgttgattggttgtttggttttgtgtgtgacagggtctttctatatagagcagaccagccttgaactcacagagatctacctgccttggcctcttgagtactgggattaaaggcttggtttttccccctgctttttatgaaatcaaaaactttagaatcatttgatataaattagaccacaaggttggtgccaggtctttagagattccatggtgctgagcagagcagagccttttgtttgctccttcaccagctttgaaccctttcctcttaatcctcctccctagctacctccctgcccccagcccttcctttgctaagcagaaggaaagcgaaagggggactgagcctttctttacagtgaaaggttcttaaaagagagccacttccccatacaaatagcattgtaactttcataggtctaacgtttaatgaatacagggtttattaactgcatgaatgaaagattctgcagactatacaggacaaagacacagctttagttgaggatagtgggacacactgctaatcccagtatttagcaggcaaagacaggcagatcactttgagtttagactagcctggtctatacagtaagttccaggatagcctgagctacatggtgagagcctgtctcaaaaaacaaaaaacaaacaaacaaaacaaaaacaaaaaacaaaaaaaaaacgacaaaaacaaacaagaaaacaagacaaaacaaggttttatggtttatgtccatacagccttatggataccaggtgtcttagcttgggattgttttatcttttaatctccgctacttccgcctttgtccttgatgttttagttctgtgcttctgaattaggtgaaagtaaagagaaacacttgctttcagcatctaaaaagcatgtgcatgctgtgtggggagactctcctcttgtctagcctgttaggcggcttaggttgctcctcactactccccaaacactcagcatctgatgctcgttatgtggtccatcttttctaatttttcctcccatctccacccaaaatagatccccacagtagacgaaaatacagtggaatggaatgaagtctgtcccaaggagatgaaggaatgggagaagggttacagagaaacagcagcgagaagtggggaaatgaaagtgaacctgagtggtgagaccaggggtgggggtgggagattcagagcctcagagcatcaggcagaagccacccctctactccatggtggccagtctttgggatagctgcttcagcttatgtgataatgtccattgacaaagttaaataaacttttaggctatccaagttccaaatagctcagctttacaaaactgcacatttttagccaacagacacaatccccagatgttgcaaggaatgctgctgtgaactgtttgctatcataacaatacactataatttcttgagctttctgtactttaaagggctgttagcataggaaattgcaaaactagcattgtcgggtctgaggagaattaagtaacataaaatagaacaaggagctggtagagtttattcagcaactagaactattacatagctgtctgaagctgccttgacctagtgccttaaaacctccataatgttcatcctaccagcattgtccttcagagctgagggaagccatcagcctgacagacactgcaagcatggcctagtgtttatgattatttcatccagattgtacctttaatgttagaaaatttaaaagaaactcctatgaaaataggatttctccacatctaaactaagtacagtgttctggagaatgtaatacaatttccttaagtctttcaaaaataattgagagttcctaaatgtgctagccacatactttattggatatgatgttccagttcatcactgtggtggcttgccccccacccccatagactcatgtgtgtgactgcttggccacagggaggggctttgttgggaagtatggccttgttggggtaggttttgccttggtggaggaagtgtgtcactgtgggggtgggctttgaggtcttttatacgctcaaactatgcccagtgtggaacatagcctcctcctgctacctttggatcaagatgtagaattctcagctgcctctccagcaccatgtctgcctggacactgtcatgtttcccaccatgatgataatggactgaacctctgaacctgtaagccaatcacaattaaatgtaaccctttttcagagttaccttggtcatagtgtttcttcacagcactaaaacctagtgtataataatctgtgcctaaaatatttttccatttgtcattttcatatgttatacattgaacatattctttcacctccattaactcctccaagatcccctctatctctctacccacccagtgtccactctcaaaaagaaaaacaaaaaaaaacaaaaccaaccaaccaacaacaaaaaactctagtaagtaaaatagataagaaaacaataccaaaaactacagcagaaaacatggagtctgttttacattggccagcgactcctgggcaagggactgccctcaagtatgctatgctcagtgacactccactggagaaaaatgattggccctttcgcagcagataccaatggcaaatgccttcttagttagggctgggactttgtgcccactttcccctctcagggctgggattttgtctggcttcaacctgtgcatggcttgtgtgcactatcacagtctctgtgagtttgtatatacaccagccctgttatgtctggaagactctcccttcttggagtcttctactacctttggcttttatcatctttctacctcctgctctgcatggattcctgagcctgggaccaaggattgatagagtattcggtttagagctgagtgttccaaagtttctccttctcttcacattgtccaatgtgagtctctgtgctaattacatctactgtaagaagtttctctaatgagcaatgcactgtatagcagtacgtcattaggagtcattttgttgctatgataatatagcagaataatagtagttttgttttttttttttctcttagggtccatggtctacatagtcttaggttcttggcctctttagcagtgccagatatgagttctagcttactgagagaacccaataaaaaattgactccttccaccacataggttcccaggtcaacaatggcaataaatgcctttgccagctgagccatttggctggccccttgtacactttacagaaaaacagaaaacacaaaatagctagcaaatgtgaggccctaattcaattctcagtactttagagagagagagagaaagagagagagaaagatgggggaaagaggatgtcgaggaaaaatagagggggagaaacatgtgacaactgaagtcatactactttctttgttctagtaaaatatacaatataaaacttaattttaatgactaaatatctagtacttaacccccattaagtacatccacactgttgttcagttcctacacagttcatcagcaggactactcatcatcccactgaaactccacgtgtaggtaacttcctagtctccgtctcttcattctccctaagtaagcatcaaatagcctctttcataattggaactgtataatacttatccatttgtgtctggcttacttcatttaatgtaatgtcttcacattttatccatgttgctggttggtatcagagttttgctattttatgaaggctgagttatgctacattgttcatctcaattttttgtttagatctttcaaaattaatttctgttgacacataatttttagttgacacaaaataattagtatatctcatccccttacaattttcattgtctggtgttaaatacattcagaatctccttttgtaaccaggaattgtggtaatgccagtagcactcggaagctagaagtctaggcagcatgagagcaacatgagctgcagagcagaaatctgtctcagaggaagaaaggaaggacggatgcctttattttgagttgtacaatgccttgtatattcaccttgcatatagcttcttttaaaaatctttgttaagacctactgattatgcatcttaataggtttcattgtggcccttccatacctgtatacaacacacattaacccaaccatggttttcagattctgcccatcttacctaccccaaatctctagcaatcactattctcctcactggtcaacattgtttttagctcccacatataaggtagatcacgagggtactggtttgtctctgtctatcttgtctcattcaataatgtcttagtctcattcatttttctgcaaatgttaatatttcatattactttgtgtctgaataaaactctgtcatgtatatatcatgatatatgtctatatcattatctgttgctgggcacctaggcggatgtatgtgttatactgctctgaatagcactgcaataaatacgacacatagtatctctttggtatgctgacttcatttcctttgggtataaacctgagtaacctttggatattgtcttagtttcctttcctgatgctgcaataaaacatttcgacaaaagtagtttaaagagacactgtttatttattctagctcagagttcaaggctacatagtccatcatggctgagagtcaggtgagaggagcttgaagaagagtactgaatgcacactcttgctcagctctctcttctcctctcatgcactccaagatgccagccagagaatagcaacaggcacactaggtagatcttcccaccccaatcaacatggtgcaggtaagtctccaccagcttgctggggggggggggatttctcagatgattctaaatgtccaggtaacagttaatcctaaccaccaggcatactccagttggattgaatggtagcctgtcaattttgtagttttgatgagtctctgtgcttttagccatagtagctatactcatttacatttcctctaagaatgtgtaatagttaatcttttctgaatcctcaaagtcccacctctatccccctgcccagtcattggctgttggctctttattgcttggtcattaccatgtaagcacaaatcaaaaccccaacatctcaccccctttgtccaataaaaaaaggctcttttctctcagatataaattgagcacaaccataacaattatataaaagttataaagtatagcatataattaacacccagtacatcatatttgtcagttagataaagtactctatcatgtattctgactttaaaagtttacagttctaattctgaattgtgttctgactttaacttgcattatcatctgaaaaccatcctttcaaatctctatcatcttcctcaatgctaaacaatttaagtttgattatgagactgtaattagtcttcaaccttgtctgaagtctgagaatgaattagatatacctgaaagtataggaagcacaaaaacatagcttctagaacttaaacaaattgtagagatagctgactacctggacagtcacctattccttaaaacattggaacatctgtcttcagttttctggtctagcatcatctgacagatcttaaatgaagcaggaactatcaaggactatttactctgttttggcagagctaagttgttgactatcttgcattgtatgtgctttcttggacattattttgtctgtagacgaattagggcagtttttatccagtggctaacttgctacaactagagcaatggagcacaatggaggttttgatgcttaattttttctttgaactgtcaaggggttgttttgagttgcggaacaatgtatgttagctaaccaacattgattacctcacatatttcgggatgattctctgaatttttcagctatggtcaccacagtgtatagtggatatacactgtgaatttatcccttctattcacctgagatgttataccttcagccatcgtcttctcagttcccagctggtaatcattccagctctgtaaccatcttctgctttgtgtgtctgtggcatcaacagtcttggcatccacatgcaaatgaaccatgaacctttgtcactgccctgtgtctgtcactctacttacgtagtaggttttgctgaagtctgaatagtatttgtatgcttaaaactcatcttctttatccacctatctgctgatggggcacatcaattgatttttttatcttggctattgtggacagccccccccccccccccgggccccgcaatctcatctcctttgtatatatgcacagtaaatgactttgctgggtccttccccttagctttatgaatttactttttgaattggcacatactactttagacttgacattatgtgtggggataaaacccaacttcaatcccttgttcaatggttaatgagctgtttcagtacagggttttgatgagctaaattattttctgctttagcgtcaaatgccacattttgttttttgtcgaatttcacgtaagtgtgagattatattcataagcctgctagtttttacattgataatgctctcttcatcatagagtgtaaataaatatcatgtacttctaacataccttaaatctaaaaggggaagttcacatgtgtcactatttttaccttttcattcattatttgaaccgcttattagcttgcattttgaaaaatctcagtgattattttgagaattaattcttcttgacatattttattgtcctcaagcatttgtctaaatctttgtgttttctcaaatacctttgtggttttctttataagaatgtctcatggttctggttctcttgacttttagatttattatcttgcatgctgctactgtaaaagattttcagttgctgttttagtatttagtatttagcattttagtaactaaaaatctgtcttgtggaagctggagagatggctcagcatttaagagcacccagaggacctgcatacacttgccagcatccacatggcagcttacaaattcctgtaactccagctccagggaatccagcctccttacacagatgtacatgcaggcaaaataccaatgcacataaagtaagaataaacaagtcatttagaaagttaaaaagaaaaagaagttcctttgtatacatgaattttgtaatggttatcaaactacaggtattatacttatttgcatttttgtggaaggcctttgtctaatagtcttttcttttttttacattttttcttctttaagtactttgtaaatattttctgaattctttttgtccaataagcatgctccaaccaggtgaaccctttcatattttggtgttaatgggaatcttcttagattttcttaatttgactggacagtggtggtggcacacgcctttaatcccagcacttgggaggcagagacaggtggtttctgtgtttgaggccagcctggtctacagagtgagttccaggacagcctgggcaatacagagaaaccctgtcttgaaaacaacaacaaaacaaaaacaaaaacaaacaaacaaaaagcaatttccttaatttgggaagtcctggccatgtgcctacagtttaccatgcggaatagtcagttctcagtggttagcatctgtgcctccacagtaacatagtaacccaacagattcccttagtttcttcagtctcatagatatgtcgttttacataccaaactcctattttacaatgagcctgttgtttctttttgtcgggggtgctatttgtagacaggaatctatagaccagaggcatagactttgtttccattcttttcaatagaaagagctggaaaagataaatatctcacactaataaatatatcatgttcatattctaagtcaataacagaaaatttatataacttctttattcttacagatgtatattttttatacatgaaaacactattttacaatcaccctcccataattactcactcaccaccccacaagggaacatagttgtttcagaagaattctaccaacaacgtgactataaaaaacagatgtggatatttttccttagggaacaaactagtcgtgatttcttttagaattgcaatggtctcttcaccaactgaaaacagttatgttcaatttttttaatttcagtgattgcttttagattttataattaagttattgtgttattctagtttatatctacgaaacagaaagtgctaaaagaatttaagcctctgcctatagcttatccatcctgtttcctccatttccaatcatgactctattttattctttcctttatatttataaatgccttttctttgtccataaggtagttctgactttaacagctttttataatggttattttttatttataggtcatttaatattctcatctcctaattttatgattaaactaaagtgacatcgcctggtgtatcctctcccacatttcccttataccgagaattaattggatggcatctccttctgcctccttgagtggtcttcatacctcttcacctggacaccatggctctctttcttgttctgtctcccgaaatttacaggttattaatttctgagtttctctgctccgcagaatagagttgtgattaagtccctggaaagcctctcactggccttctgactccacacagggtttttttcaactatcacttgagttttcttttctttatagaaaatttgggttataatgcgggtttcataatgtcattataagtactggatgagatgatatgtggatagcacataacatcatatgtgctatgcagcagtatttcaggaaataaaatgttggctacttgaaacaagatggaagaggtggttattagttcataattttacgtgggtattcgtttggtaaatatttactaaatcatttttttcattattcatttaattagtgactacttattgaatattatctcctaagcattcttgtttatatttattcaacaagagttgagtccacatgggttaggtcttcgtgatacagtggtagaaaagatagatatggccccaaccttaacaagtttcagtcttctttcttgctgaaagccatttctaagtaagcaattttgctctgaaagtccccttaggcgtccccagaatgctggcacttgacatgtctgaaaataatgatctcatttcgctacattactgaatgctcagttcccattttattcaaacttctactaaaattaaaactgctaggcaagttgttcagaactcttctgtacttcccttacaaactgcagtttggtttgaaattccaacaactatagtacccaatgaatcaagggtgacatttacaatgaggaaaaagttctttatggcaaacaacaaaatttagctaacatgtctgctctcagtgtttctctaaccctttcaaaatttattttccattgttccattctgtacgttttattccactgaaactaaacagcaaaatccacatcaataatatttgaaatataaataatttctataatattttaattcatcaacaaagcatcacatttaggtttatgtgatcttcccattaaattatacaaaaacagcaaaaaaaaaatctctgaaagtataaagttttagatctgaaacctgggacaacatgctcaaacagctttatcctcagagaggagaaaagacaggaggaaaggagagaagagaggagagaagaagagaggggagagaagggggaggnnnnnnnnnnnnnnnnnnnnnnnnnnnnnnnnnnnnnnnnnnnnnnnnnnnnnnnnnnnnnnnnnnnnnnnnnnnnnnnnnnnnnnnnnnnnnnnnnnnnnnnnnnnnnnnnnnnnnnnnnnnnnnnnnnnnnnnnnnnnnnnnnnnnnnnnnnnnnnnnnnnnnnnnnnnnnnnnnnnggagaggaaatgagggatggggacgggggacacctcccccgaagctagcacaccaggttttgttttttttttttttcagtcggttgaatggtattttaaaggtagatgcataggtagatgggtaggtggatggatggttccaatatcaaatatctacctagtccataaaaataacaaatggtagaaatgacctgagacttagtatgaagcatgtgttgacagaagaggcaggttgtacttctaaaagggcagtcccatctagtacctgcaaatggcagtctcttttaaatagcagttgtttgattactattcgaatgtgaatccagtgtcatcaaatttaataaaaatttcacttagaaccgaaaacttgggttttgatggcaaaacttaattttttttgagttgacaattattttttgaaaatacgtgcagcggctgaggagatggcttagtcagtaaagtacttgcaacacagccttaggatctgagcccagattcccagcacctacataaaaagtgggtatagcatagcacatacctatgctcgcatagagcataccagtacacacatagagcatacctatactctcagcactggagctgggggacaaaaacggctctggggcacaggagccggccagtcagctgaattggtgagtaccaggctcagtgagagactctatcccaaacaataaggtggtgagcaagtgaggaagactcatgtcaacctctgatctacaccccaacacacacatacacacacacatatacacacacatatacacacacacacatacacacaaacatacacacacacatacacacatacacacacatacacacacacacacacacacacacacacacacacacacacacacctctagtgtgtttatacagttggctgctagtttgcagtctctgccacaaattgcaccattatgatgtggttttacatggtttaaaagctatagatgctattttacttccttcttcagatatgaaaatttatataaatacttaacttatccttaaactgtttcaaccagttcaaaataactgaaaatatgtcagttccttgaagtgatgctatttatgtttgccagaaaacacattcagtttttgtaatagtcaatttagtgaactagaaacagatgtctttgaagaagtgtttgctaaaatctatttaaatttttcatttatttttattactttgtttatcaaggttggtattaagtaagaaaagctatggttatcttatggcattctgatacagttttctctgctttttaaaaagctatgatagactgaaaaaaaactaggtattgattataaaactaaattttctggtaaattgtgttattttttttttcatacccaccctttttggggacattccagggtaatctgctatttaattcccaaagagtatagctatttttggtcacaagctaactggaatgtttaaagaaatttaaaagacagctaactggttcatattaagatagtataaaagttcttaacttcctaaaatattaattttataaatagccattgagatagtaaaattttacttttacttcccctccaagaagaattgttagaatatcaacatccatccagccattgcatcttgtgacttactgatttggtccacagctctactgaagttgttagtaactcgtagtcatatgttctggaggtagaccatgttggggtgaggatgttctctgggtagtaagctgtcaggacaaagcatttggtatgttcttactcgaaggctcttccattttgagcttgtatatatattctatatacagttagctaatccacaaccaaaatcaagttgatagccttttcaaaaaggactacacacacacacacacacacacacacacacacannnnnnnnnnnnnnnnnnnncacacacacacacacacacacacacacatacacacacatacacacatacatacacacacacacacacacatacatacacacacacacacacacatacacacacatgcacacacacacatacacacatacacacacacatacacacacatacacacatatacacacacacacacatacacacacatacacacatacacacacacacatacacacacacacatacacacatacacacacatacacacacacacacacacaccacacacacacacacacatacacacacacacacacacacacacacacatacacacacacatacacacacacacacacatacacacacacacacatacacacacacacatacacacacacacacacacatacacacacacacacacacatacacacacacacacacacacatacacacacacacacacacacaccacacacacacacacacacacacacacatgtgcgtgtgcatacactcgtgcatgcactttctaaactgaccatggtgcatttctgaatgactggcttagactctgatgtcctccatggtcattttggcccagaccacatgtgtatgtggaaagagaaagccacacattgtgacttccttcagtgggatggccccctgaagccatcccacatcagactgccaacgtgtgctaagcgtgcactgtgggtcccggacggaacatgatccctgccttcagagagctcccccccacctccaccccggtgagcatggactcaccatgatgggataagagctctcaccgagaatgtttgtgatatggaggcctcttcccttcaacatttccagaactttggtgtcaggcagtattctaaaactcagatatatcaagtaaacaaaagtgccaaatacattcagacccaaacatctgtagaacccataaaaacctcattctggggttgcgagttcggtcccctgcttatgcagcaaataacagagtgaagaaaacgggacagctcctgtacagctgaagacaatggcaaaaggtgaagttaagaaaaaaattccattcacaataggttcaaaatgaacaagagagctgagaatacatttaattaaaataaatggtttgtccaaatgatgccaggatgtgaaggcctgtaacagtaaattagcaagaatgaacctcacacgtccgcacagtccatccccaagttccattttatggtattaaagcagaagttgaagctgcagctttgaggtttttgttcttttattttttaaagagcatggctgtgatcagcagagaaaggcatcattgtccaccccagtctgcctgctgggagggagtagggagttctccaagttgccttccaggccaaactcacggttgcagatggactctggcaaaagcatctttcaagtaagaaggggcccagcaaaacaaacgaaagcaaaaacaaaacaaaaacagaaaaacaagaaacaaaaccacaaaaccctgacttcctttgttgtgtggagcacctctgcctgagcctgaccagccttgagctggaatgaactgatggacagctcagacagctgagagaggacgcactctcagcacacaaaagtggccctgaaagctgggcacccacagcacagaaagcaaccacatccagagatacagtctgattttaatctgggtgcgcccacacttgcagggcagcctcttgtcagcggccgtcatctgagacaacaaagaaagctgagtagccagctgtgcacatctccatgcattcgtgttctttgcatgagcaacactcatgtcaaccaccagcacactggctccctgcacggttttattgcccacgtcactcaaggcctttgcaggtgcagcagaattgaagcctctgtgtgtgtgcaggactcaaagctcattggtcagagtcacataaacagaaacccccttggggctcctcttgtaggccgcttccaccagcgcttctcctctgtgattttgttttaatctaatttctttcccgactcttcttggattgtgctctggcccgatgtgactgtcgtttgtggtgagagagttttgagttcattggtgataagccctggctcgcgctatcaagtttttcaagaagcatctggtcatctgtctcatgtcctgtctctcgctgccaccgtccctgttgtcatccctcccaaggatcctgggagctgttatgagtcttttaaatagcttctatacatgcacaataagctatccacaaatgaattaagaaggaaattccattcacaataatagattcaaaaagaataaaatacctggaaatatctgcaataaaaataaatggtttttataatccaacccaaatgggattgttagcatcccagacaacttctatttcaccaggacaactgttaatgtttaaaggatgtagcatcttactgacatgcatatgctcggcatgtacttatctactttgctgtgtatataccattaaacaattttcatttaactgtgagaccatgcttatagctaggcacctgaactatttaatgtccactgcctttaataccttaatgcctgggaggtcctgtttgtctcttctgccctccccctcacattcctgtggagggccaccaaaggagaaaccagacagctgagtgaacacagtgccggctttccttctgtgagccttgacagccacaacgggagaagagaagcctgggcgagctggccagtttgtccagcacatttctactttcctgatcccatttcaggccaactgcttgtctctgtttctccctttacatttgccttctgtgacagagaagttagagcagaagcgaagggatgaacccaagttctcccaagtatattgctgtttttaagaaaaaacctaagtcagtgacaatttaatcaaagttaattagagcttgcaagatgccaaactgtgctagaagtcaaagatgagaccagtgaggatcctcccagggctgaggagtacgcagtttgagacatacttgacagtgtgtaactgcagctaatgtgtacagtaataggtgtgtctgaacatataggagcaacggagagaaagaataattttgcctggaagtttcacataaaaggagctgtagatggtgagaactgggattgatttttttacttttttagctactggcttcctgagacagaggctggccttgaactcccatctctctgtctccaccttccaagtcctaggattacaggcatgtgcctagcttgactccaggatataataagactccttcgagaagaaaagagagaagaaaaagcaaatcacagatgggaaagtccaacagtttggtaactgccctcattttttattactaccataacaaattattacaaatttagcggcttaaacacagttttaccatcttataactctgaaggtcataagtccaacttgggtcacagttggccacagtcaggttgcttcccagactatgttctttaagggagggtatctggctgcttggtttggttcatgatcaccttccctccatgttcaaagcctacagtgatggggtaaggcctacctgctttcaaaactgatcttcctctttcctttttatccatctaaactacccaggaaaaggtctctgcttccaaagactggcaactaaactgggttcacttggataatccacagtgctccctctacctcaaggcccatgttcttactttagctgcagaattctctttgccatggaaagtaacaaatacacattccaggagttaagacgtgggcctcttggtgagagcattaatctacctaatacaggaactatttcatggcactgaaatgaccagtggaccttaaagacagaagacaggttaagaggggttgcagcttctggataacaaagaccctgcacatcatgtaatagaagcttaagtgctgaggccaaggtgagaattgtgtcatctggtagcttatacgaaggacagagtcaaggtagataagacataaatctgtgaaagctgtgcattgccaacatcttagtaaggagggataaggctttgtgcatggcactttgtagattgtctaaaacaatcgagaagaacgtaattcaacaggatttataaaagaaatccccatagtgcagaagccatgcttctttacggggtagggccaaatcttgaggaacactaacttttttttcaaaatttattttttattacactaataaaatttattttaaaatatacaactcagtattgacttctttaagtcatcaaaataatttataatagctaaatgtctcttaaatatacatggtatcttctgaagataaaagtaatatgtactcaaccagtttttagaatctatttggaacattaaacatgatagaagtagaaaaaaattcttatgaagtcctctatgaaaggaaattgtcacaagttcctgattaaactgaaaccatttcatctccaagggagactacagagtgtaactgtggcttcctaaaatgaattgggtaatgttccttctgtttctattttgtgtaatagtttgaagagttttggaattaggtcctctttgaaggtctgataaaatttttcactaaacccacctgggctatgtttttgttgggaaaccttttttttttttttttttttttttttttttagatggtgacccttttatttttgctttggagaacaggtttagacatttaacattttgatgtgtcacgttgtgtatgtttcatataaaattaataataaatgtagcaatgctgtataacattacatacgtatttctattatttatatagttatttaaacctcagttttccttaaagagaagctagacaactcctttggaattaaacgagcaggaaactctgtaattccacaatccaaagtcgtgagaactaatacaagaaagtgacctgggctagttgggaaacttttaatgactgcttttatttctttaggggtttggggactgtttagtttatctgatcctgatttaactttggcatttggtatctgtctagaaaattgcccatttcatccagattttccagttttgttgaatataggcttttgtagtaggatctgatgattttttgaattttctcagtctctgttgttatatcaccattttcatttttgactttgttaatttggatactatctctgtgccctctggttagattggctaagggtttatctaccttgttgattttctcaaagaaccagctcctggttttgttgattctttgtatagttctttgtgtttctacttggttgatttcagccctgagtttgattattccctgcagtctactcctcttgggtatatttgcttctttttgttctagagctttcaggtgtgctgtcaagctgcgagtgtatgctctctccagtttctttttggaggcactcagagctgtgagttttcctcttagcactgctttcattgtgtcccataagtttgggtatgttgtgccttcattttcattaaattctaaaaagtctttaatttctgtctttatttcttccttgaccaagttatcattgaattagggtgttgttcagcttccatgtgtatgtttgctttctgttgtttttgttgctattgaagaccagccttagtccatggtgatctgagaggatgcgtaagattatttcaatcttcttgtatgtgttgaggcctgttttgtgtccgagtatatggtcagttttgaaaagggtaccatgaggtgctgagaagaaggtatattcttttgttttagaatgaaatgtcctgtagatatctgttaaacccatttggtccataacttttgttagtttcaccgcatctctgtttagtttgtttctgtgatctgtccattgatgagagtggggtgttgaagtctcccactatttttgtgtgaggtgtaatgtgttccttgagctttagtaaagtttcctttatgaatgtgggtgcccttgcatttggaacataggtgttcagaactgagagttcttcttggtagattttcctttgttgagatgaagtatccttccttatcctttttgataacttttggttgaaagtcaattgtactcgttattagaatagctactttaccttgtttcttgggaccatttgcttgaaaaaattgttttccagcctttcattatgaggtagtgtctgcctttgacactgaggtgcatttcctgtatgcagcaaaatgctgggtcctgtttatatatccagtctgttattctatgtcttttttggggggaattgagtccattgtgttaagagatactaaggaatagtgattggtgctttctgttatttttgatgtttttatgttcttttgggtttgttgaaagaagattactttcttgctttttctagggtgtatttcccctccttgtgttggtgtttcccatatattatcctttgttgggctagatttgtagaaagatattgtgtaaatttggttttgtcatggaatgtcttggtttctccatcaatggtaattgagaattttcctgggtatagtagcctgggctggcatttgtgttctcttagggtctgtatgacatctgcccaggatcttattatcaatatattatagagaatagaagcagcagttttcaaaaatcccaaatcagacttgtaaagacaaaacaccagtctctgaatggagaagtcactgaaaagatttagcaaataagatcccgaggaagagatgggtaaacagcaagtaatggtaattactgtcccaatccaaccatggaaagagagagatgaggaggaagatctttaaagaaccagaacaagaaggcacagtcagtgtcaatgtgctgagcaggcagcgtgtccaatgtgtggaagaggagaggagagaaggggagcagaagagatgaaaacagaaggaaagaaggttcaccacacagggtgtggtgtctgtggcaagcattcttgtttgtttctatgtgagaacagtgaacagatttgtgggttgaggataatggtaataaaatgactgccattggttaaaccttgatttgtgaactgaaatacaaaatggcatgaggtatcaagatatttcacttatattttctttgcctttatcatcttataagatgggactgtcctagtttgctttctgttgctgtgatgaacatcttgaccaaaagcacctggaagaaaggagggcttatttgaccttatatgttacagtccatcataaatggaaggcccgccaagagtaaggtgggaactggagacagggaaagatgcagaaccaatggagacctggttactggcttattccgctatctttcttatatagcacagacctacctgcatagggattcgtaccgcccactgtgggctaggccctcttctatcaattagtacaaaccagtctgaccctggaaaattcttggttgaggttttctcttcccaggtgactttaggtttgtgttaaatcgacaaagtcatgaggcctgtttttccctatctttcacagttgaataaacagagccatacattgattagatattattctacattacatagtttaaaagtagcaaagctggaattcaagccaagtccatgtgttgtgcatgtggtgctgagccagcatgaagagaaagcagagacagacaccctaactgatgacgtgggaagggatgagacagcacagggaggtgggttgaacttgaccaagaagctgtgtgactaagcaggagtgcactagaaatcgctccgaatgcctgtgctattgacttccagcagggaaacagaggggtgagtgagagaggaaagatacagactttcaagctcatgacacatccagaatcatgccaggcattttgtaaaggcagccagaccagcagatactgtccgcaaggccagaacaccttggacagagtcacggttcctgtacacgcccacacgaacactaataatttcctcatgctgacctcctttcagataaggtcacttggtagaagatctttccttggaatgtcctaaaatttcaacttttgacatttttttcatactactccatgtcatccacaaatcgtgaactcttgttaaacttttggctacagagtaaatgtttccttcaagtcacaattaccaactaggcggttcagaaacacaagtccctattgtgcaattggatttgggaacttctgacattatatttaacctttcatgtgtatatgctctaacagtttaacactggcccttcatgctgtatttctttgattctgcatttttaaaatatgacacacttggtttctgtacccacttatattgtgcagtgtgaaaatacaaccatttttttccacatctgatactgtggatgaataaaacattttttatccactaaaactgagtccaaagttcccacccatggatgggacaccttaaagaaacagtctgtagtctcacaggaaaggaaccttttctgagtgtgagcatggagattatgactgatttattcttttccgtgtgtgtgtgtgtgtgctcatgtgtacacatgtatatgtgaagaccacagatcaacatctgaggtcttcctccatcactctcctctttgatttttgagactaggcctctcaatgaacccagagcttactgactggctagccagacagctcgaaggtactgcatatctcagcctgctgctatatgacttcttacatgggaactatggattcaaagtcgaagtctttgtacctgtatgccagaaactttactgagtgagatattttctcaggcctgacttttaattgtaaggacataaatatattttctgtgatttcagtatttttctcataaaagagatttgttttcagtagcggggacagaaaaaaaggttttcttcttggacatctgacttaacttttactttatacataatcttcaaagacaaatgaagtgttttatccactaagcatttgtgagtttataagatgctgagggccagtggagtgataaagatggctaaaaggtgaacctctctagacgtcccactttatctgtggctgtaaaacctgccaagcatcctggcccacctgccattagacttcaagtaatttgtgaccagatggcactgcatttagaggatagtcagcccaactttgccagaggtttactctggctgccagcctctcagatctgacccaccatcctccagcttgaaattctgctctgattgtccattcattagaagtcatgtctagcatattttaagagcctataggtattaaaaaattgaacctgtgttttgcaaggaatggaggaagggaggaaggaaggaaggaaggaaggaagggaggagagggaaagcgagagggagaggtatgtgtatacagaagcgggcacatactttgagcacagaggacatttcagcgtgtccgtttggatcttctggctctctagtcccccacaccaaggtaaaatcagattgtgttctacatgaggaacttaaccttcttactcaaggcagttcagcctcattctccactgcacagctctgaacccggtcattgacgtttgctggcttctttaagtggtaaatgacattaaagagtacactgtagatattatgaggtatttgtttctaatgtggcatttttctagacctgtacacaagtaggatttaaaaaataatggcaatgaatttatacatttatttgtttgtttgtttctcaagacagggcttctctatgtagccctggctgtcctggaactcattctgtagaccaggctgacctcactcacagagaccccccccccctacctctggctcctatagtgctgggattaaaggtgagagcctctaccacctggcttatacttggttttgaatttaactgtactattttcttgggttttttccagttgcatagctctttttcatattggaatcttgaatttacagttatgtttttgttttattgagttaggatgcacatagggaaaaaaactccactgaattttagtgtatgtatagagttgtattatcagcatgttctaattttagaatatttccattataccaaaaataaaagttgtgtctcttttcttacacattactccttctcttggttgtcatattttgatggggattgcattgaatctgtagtttgctttcagcaagatagccatttttactatattaaagctgccaatccatgagcatgggaggtctttccatcttctgagatcttcgttttctttcttcagaaacttgacgttcttatcatacagatctttcacttccttagttagagtcacaccaaggtattttatattatttgtgattattgtgaagggtgttgtttccctaatttcttctcagcctgtttgtcctttgtgtaaagaaaggccactgatttttttgagttaactttatatctagctactgattttagtgggattgcttcaagtttctctccatttagtttgatgttggctattggtttgctgtacattgcttttatcatgtttaggtatgggccttgaattcctgatctttccaagacttttctcacaaaggggtgttggattttgtcaaatgctttcttatcatctaacaagatgatcatgtgatttttgtctttgagtttctttatatagtggattacattgatggatttctgtatattaaaccatccctgcatccctgggatgaagcctacttgatcatgatggatgaccgtttttgatgtgttcttggatttggtttgcaagaactttattgagtatttttgcatcaatattcataagggaaactagtctgaagttctttttctttgttgggtctttatatggttttggtatcagagtaattgtggcttcatagaatgaattgggtagagtagcttctgttcctattttgtggaatagtttgaggataattggaattaggtcttctttgaaggtctgatagaactctgcactaaacatatctagtcctgggatttttttggttgggagactattaatgactgcttctatttctttaggggaaatgggactgtttagatcattaatctgatcctgatttaactttggtacctggtaactctctagaaaattgtccatttcatccaggttttccagttttgttgagtgtggctgtcttagtcagggtttctattcctgcacaaacatcatgaccaagaagcaagttggggaggaaagggtttattcggcttacatttccatactgctgttgatcaccaaaggatgcaggactggaactcaagcaggtcagaaagcaggagctgatgcagaggccatggagggatgttctttactggcttgcctcacctggcttgctcagcctgctttcttatagaaccaagactaccagccctgagatggtcccacccacaaggggcctttcccccttgatcactaattgagaaaatgccttacaattgcatctcatggaggcatttcctcaactgaagctcctttctctgtgataactccagctgtgtcaagttgacacaaaactagccagtacaattgaccccttgtcaacttgacacacaaaaacatcactagtaagcctcaacccttacaatcttattcatccccattctaaataactttaaaagtcccacagtctttacatattcttaaattttcaatctctttaaaatatccatctcttttaaaattcaaagtctttttacaattaaaagtctcttaactgtgggctccactaaaacagtttcttccttcaagagggaaaatatcagggcacagtcacaatcaaaagcaaaaatcaatctccaaccgtccaatgtctgggatccaactcacgatcttctgggctcctccaagggcttgggtcacttctccagccatgccctttgtagcacacgcgtcatcctctaggctccagatgcctctactccactgctgctgctgctcttggtggtcatctcatggtactggcatctccaaaacactgcatgaccccttcagtcctaggccatcaattgcaactgaggctgcactttcaccaatggccttccatggcctctcacagtgctaagtctcagctgctctgctcaactccttcatgccttcaaaaccagtaccacctgggtgacccttacacgttaccaagtccagccagagcacaaggtacaactttggctatatctggaacgcagccactgtgctctcagaaaacacttcccagaagatgtcacctcaatgatgctggtctcttcttaatcaccgctaatttcttagctccagctaaccagcatcaatagtcccagtaatgcaaagtttttgctttagtagttctggtatcttgttaatcacagctgattcttcagccccagctaaccagaactacagaatcttcacaatcaaaacagcaatggccctgaaaagagtctttaattttccctctgaaatttcacaaaccagacctccatcttctgcagtgttctcaacattatcttccaagctcctacacaacatctgacagagctcttaacaatggatggatcttcaagcccaaagttccaaagtccttccacagtcctccccagaacatggtcaggttgtcacaggaataccccactctgctggtaccaatttgtcttagtcagggtttctattcctgcacaaacatcatgaccaagaagcaagttggggaggaaagggtttattcggcttacatttccatactgctgttgatcaccaaaggatgcaggactggaactcaagcaggtcagaaagcaggagctgatgcagaggccatggagggatgttctttactggcttgcctcacctggcttgctcagcctgctttcttatagaaccaagactaccagccctgagatggtcccacccacaaggggcctttcccccttgatcactaattgagaaaatgccttacaattgcatctcatggaggcatttcctcaactgaagctcctttctctgtgataactccagctgtgtcaagttgacacaaaactagccagtacagtggccttttgtagtaggatctgatgttgttttggatttcctcaggctctcttgttatgcctcctttttcatttctgattttgttaattaggatactatccctgtgccctctagttagtctgtctaagggtttatctatcttgttaattttctcaaagaaccagctcctggtttggttattctttgtatagttctttttgtttccacttggttgatttcagctctaagtttgattatttcctgctgtctactcctcttgggtgaatttgcttccttttgttctagtgcttttaggtgtgaaatcaagcggctagtgtatgctctctctagtttctttttggaggcactcagagctatgagttttcctcttaggaatgctttcattgtgtcccataagtttaggtatattgcggcttcattttcattaaactctaaaaagtctttaatctctttccttatttcttccttgaccaagttatcattgagtagagtgttgttcagcttccacatgaatgttggctttctatttatgttgttattgaagatcatccttagtccgtggtgatctgataggatgcatgggataatttcaatatttttgtatctgttgaggcctgttttgtgaccaattatatggtcaggattggaaaaggtaccatgaggtgctgagaagaaggtatatccttttgttttagaataaaatgttctgtagatatctgttgaatccatttgtttcataacatctgttagtttcaatgtgtctctgtttagtttctgtttccaggatgagtcattgatgagagtggggtgttgaagtcacccactattattatgtgaggtgcaatgagtgctttgagctttactaaagtttccttaatgaatgtggatgcccttgcatttggagcatagatattcagaattgagagttcatcttggaagattttacctttgatgagtatgaagtgcccctccttgtcttttttgataactttgggttggaagtcgattttattcgatattagaatggctactcaagcttgtttcttcagaccatttgcttggaaaattgttttccagcctttcactctgaggtagtgtctgtctttttccctgaggtgggtttcctgtaagcagcaaaatattgggtcctgttaatttagccagtctgttagtctatgtctttttattggggaatttagtccattgatattaagagatattaaggaaaattaattgttacttcctgttatttttgttgttagagttgggattttgttcttgaggctatcttcttttaggtttgttgaaggattactttcttgctttttcgagggcataatttcgctccttgtgttggagttttcctttattatcctttgaagggctggattcttggaaagataatgtgtaaatttggttttgtcatggaatactttggtttctgcatctatgataattgagagttgtgctgggtatagtagcctgggctggcatttgtgttctcttagggtctgtataacatctgcccaggatcttctagctttcacagtttctggttagaagtctggtataattctgatagatctgtctttatatgttacttgacctttttccattactggttttaatattctatctttatttagtgcatttgttgttctgattattatgtgtcaggaggactttcttttctggtccaggctatttggagttctgtaggcttcttgtatgttcatgggcatcactttctttaggttagggaagttttcttctataattttgttgaagatatttactggccctttaagttgaaaatcttcattctcatctatacatattatccttaggtttggtcttctcattgtgtcctgggttttctggatgttttaggttgggatctttgtgcattttgcattttctttgactgttgtgtcaatgttttctatgatatcttgtgcacctgagattctctcttccatctcgtgtaatctgatgctgatgctcgcatctatggtttctgatttctttcctaggatttctatctccagagttgtctcccttttggttttctttattttttctacttccatttttagatcttggatggttttgttcaattccatgacctgtttggttgtgttttccagtaattcttttgtatattctgaatactttggactatttctgtttaaggtagaggattttgttttgttttgttttttgttgttgttttttttactgttgtttcttttttttccttttttttattacatattttcctcaattacatttccaatgctatcccaaacccccccccctactcccctacccacccattcccattttttggccctggcgttcccctgtactggggcatataaagtttgcctgtccaatgggcctctctttccagtgatggccgactaggccatcttttgattcatatgcagctagagtcaagagctctggggtactagttagttcataatgttgcacctacagggttgcagatctctttagctccttggatactttctctagctcctccattgggggccctgtgatccatccaatagttgactgtgagtatccacttctgtgtttgctaggccccggcctagtctcacaagagacagctatatcacggtccttgcaacaaacgcttgctagtgtatgcaatggtgtcattgtttggaggctaattatggggtggatccctggatatggcagtctctagatggtccatccttttgtctcagctccaaactttgtctctgtaactccttccatgggtgattgtttccaattctaagaaggggcaaagtgtcaacactttggtcttcattcttcttcagtttcatgtgttttgcaaattgtaccttatatctcgctatactaagtttctaggctaatatccacttatcagtgagtacatatcatttgagttattttgtgattgtgttacgtcactcaggatgatgccctccaggtgcaaccatttgcctaggaatttcataaattcattctttttaatagctgagcagtactccattgtgtaaatgtaccacattttttgtatccattcctctgttgaggggcatctgggttctttccagcttctggctattataaataaggctgctatgaacatagtagagcatgggtccttcttaccggttgggacatcttctggatatatgcccaggagagttattgctggatcctccggtagtactatgtccaattttctgaggaaccgccagactgatttccagagtggttgtacaagcttgcaatcccaccaacaatggaggagtgctcctctttccccacatcctcgccagcacctgctgtcacctgaattttttatcttagccattctgactggtgtgagatggaatcttagggttgttttgatttgcatttccctgatgattaaggatgttgaacattttttcaggtgcttctcagccattcggtattccttgggtgagaattctttgtttggctctgagccccatcttttaatgggtttatttgattttctggagtccaccttcttgagttctttatatatattggatattagtcccctatctgatctaagataggtaaagaccctttcccaatctgttggtagcgtttttgtcttattgactgtgtcttttgccttgcagaagctttacagtttcatgaggtcccatttgtcaatcctcgatcttacagcacaagccattgctgttctatttaggaattttccccctgtgcccatatcttcaaggcttttccccactttctcctctataagtttcagtgtctctggttttatgtgaagttccttgatccannnnnnnnnnnnnnnnnnnnnnnnnnnnnnnnnnnnnnnnnnnnnnnnnnnnnnnnnnnnnnnnnnnnnnnnnnnnnnnnnnnnnnnnnnnnnnnnnnnnnnnnnnnnnnnnnnnnnnnnnnnnnnnnnnnnnnnnnnnnnnnnnnnnnnnnnnnnnnnnnnnnnnnnnnnnnnnnnnnnnnnnnnnnnnnnnnnnnnnnnnnnnnnnnnnnnnnnnnnnnnnnnnnnnnnnnnnnnnnnnnnnnnnnnnnnnnnnnnnnnnnnnnnnnnnnnnnnnnnnnnnnnnnnnnnnnnnnnnnnnnnnnnnnnnnnnnnnnnnnnnnnnnnnnnnnnnnnaagagtttttgctatcctaggttttttgttattccagatgaatttgcagattgctctttctaattcgttgaagaattgagttggaattttgatgggggattgcattgaatctgtagattgcttttggcaagatagccatttttacaatgttgatcctgccaatccatgagcatgggagatctttccatcttctgagatcttctttaatttctttcttcagagacttgaagtttttatcatacagatctttcacttccttagttagagtcacgccaaggtattttatattatttgtgactattgagaagggtgttgtttccctaatttctttctcagcctgtttattctttgtgtagagaaaggccattgacttgtttgagtttattttatatccagctacttcaacgaagctgtttatcaggtttaggagttctcaggtggaatttttagggtcacttatatatactatcatatcatctgcaaaaagtgatattttgacttcatcttttccaatttgtatccccttgatctccttttgttgtcgaattgctctggctaggacttcaagtactatgttgaataggtagggagaaagtgggcagccttgtctagtccctgatttcagtgggattgcttcaagcttcttaccatttacttttatgttggctactggtttgctgtagattgcttttatcatgtttaggtatgggccttgaattcctgatctttccaagacttttatcatgaatgggtgttggatcttgtcaaatgctttttccgcatctaatgaaatgatcatgtggtttttgtctttgagtttgtttatataatggattacattgatggattttcgtatattaaaccatccctgcatccctggaatagaacctacttggtcaggtgattgctttaatgtgttcttggattcggttagcgagaattttattgagtatttttgcatcaatagtcataagggaaattggtctgaagttctctatctttgttggatcttgctgtggtttaggtatcagagtaattgtggcttcatagaatgagttgggcagacttccctctacttctattttgtggaatagtttgtgcagaactggaattagatcttctttgaaggtctggtagaactctgcactaaacccgtctggtcctgggctttttttgggtgggagactattaatgactgcttctgtttctttaggggatatggaactgtttagatcattaacttgatcctgatttaactttggtacctggtatctgtctagaaatttgtccatttcgtccaggtttttcagttttgttgagtatagccttttgtagaaggatctgatggtgttttggattttttcaggatctgttgttatgtctcccttttcatttctgattttgttaattaggatgttttccctgtgccctctagtgagtctagctaagggtttatctatcttgttgattttctcaaagaaccaactcctcgtttgcttaattctttgaatagttcttcttgtttccacttggttgatttcacccctgagtttgattatttcctgctgtctattcctcttgggtgaattttcttccttttttttctagagcttttagatgtgttgtcaagctgttagtgtgtgctctctccagtttcttcttggaggcactcagagctatgagtttccctcttagaaatgctttcattgtgtcccataggtttgggtatgttgtggcttcattttcattaaactctaaaaagtctttaatttctttctttattccttccttgaccaaggtgtcattgagaagagtgttgttcagtttccacgtgaatgttggctttccattatttatgttgttattgaagatcagccttaggccatggtggtctgataggatgcatgggacaatttcaatgtttttgtatctgttgaggcctgttttgtgaccaattatatggtcaattttggagaaggtcccatgaggtgctgagaagaaggaatatccttttgttttaggataaaatgttctgtagatatctgtcagatccagttgtttcataacttctgttagtttcactgtgtccctgtttagtttctgtttccacgatctgtccattgatggaagcgatgtgttgaagtctcccactattattatgtgaggtgcaatatgtgctttgagctttactaaagagtctttaatgaatgtggctgcccttgcatttggagcatagatattcagaattgagagttcctcttggaggattttacctttgatgaatatgaagtgtccctccttgtcttttttgataactttgggttggaagtcgattttatccgatattggaatggctactccagcttgtttcttcagaccatctgcttggaaaattgtttttcagcctttcactctgaggtagtgtctgtctttttccctgagatgggtttcctgtaagcagcagaatgttgggtcctgtttgtgtagccagtctgttagtttatgtctttttattggggaattgagtctattgatattaagagatattaaggaaaagtaattgttgcttcctattatttttgttgttagagttggcatgctgttcttttggctgtcttctttttggtttgttgggggattactttcttgctttttctagggcatgatttctgtccttgtattgttttttttctgttattatcctttgaagggctggattcgtggaaagataatgtgtgaattttgttttgtcatggaattctttggtttctccatctatggtgattgaaagtttggctgggtatagtagcctgggctggcatttgtgttctcttagtgtctgtataacatctgtccaggtatttctggcttttatagtctctggtgaaaagtctggtgtaattctgataggcctgcctttatatgttacttgacctttctcccttactgcttttaatattctctctttatttagtgcatttgtttttctgattattatatgtcaggaggaatttcttttctggtccagtctatttggagttctgtaggcttcttgtatgttcatgggcatgtcattctttaggtttgggaagttttcttctataattttgttgaaggtatttgctggccctttaagttgaaaatcttcattctcatcaactcttattatccgtaggtttggtcttctcattatgtcctggatttcctggatgttttgagttaggatttttttgtgttttgtattatctttgattgttgtgccgatgttctctatggaatcttctgtacctaagattctctcttccatctcttgtattctgttgctgatgctcgcgtctattgttccagatttctttcctagggtttttatgctccagcgttgcctcactttgggttttctttattgtgtctacttctctttttagtctagtatgtttttgttcatttccatcacctgtttggatgtgttttcctgtttttccataaggacttctacctgtttggttgtgtttttctgtttttctttaaggacttataactctttagcagctttctcctgtatttctttaagtgagttattaaagtccttcttgatgtcctctaccatcatcatgagatatgcttttaaatccaggtctagattttcggttgtgttggggtgcccaggactaggtggggtgggagtgctgtgttctgatgatggtgagtggtcttgatttctgttagtaggattcttacgtttgcctttcaccatctggtattctctggagctagttgttatagttgtctctggttatagcttgtttccacaggtgattatgttagcctctatcagcagacctgggagactagctctatccttagtttcagtgctcagagtactctctgcaggcaagctctcctcttgcagggaaggtgcccagatatctggtgtttgaacctacctcctgacagaagttgtgttccacttaccataggttttaagatcccgtggcggatcctgtgtgggtccagagactccccgggccagggaccctggtgctgcagtgggcaggaagggacttgtgccctggatcaggccgggttatctgcttccttaattaatgcagtctcgggtcctgcacgattggattggagcaggtgctgtgttccactcaccagaggtcttaggatcccgtggcggatcctgtgtgagtccttgcgggtgtccggagactccccggtccagggaccccggtgctgcagtggaccggaagggacttgtgccccggatcaggccgggttatctcgttttcctgtaattctttaaggggtttttgtgtttcctctttaaggtcttctacctgtttagcaatgttttcctgtatttctttaagtgagttattaatgccctcttcaaatcctctaccagcatcatgagatatgattttaaaatacaaatcttgcttttcgggtgtgttggggtattcaggattggctgtggtaggtatactgggttgtagtgatgccgaatggtcttggtttccattagtaagattcttatgttttcctttagctatctggtaatctctggtgttagattgtactagctagttttgtgtcaacttgacacagctggagttattacagagaaagaagcttcagttgaggaaatgcctccatgagatccaactaactgtaaggcattttctcaattagtgatcaagggggaaaggccccttgtgggtgggaccatctctgggctggtccttcttggttctataagagagcagtctaagcaagccaggggagtaagccagtaaagaacatccctccatggcctctgcatcagctcctgcttcctgacctgcctgagttccactcctgacttcctttaatgatgaacagcaatttggaaatgtaagctgaataaaccctttcctccccaacttgcttcttggtcatgatgtttgtacaggaaaagaaaccctgtctaagacatagatgttctagctgtcgctggctgtagcttgttcctcctgtgattctcttaccctctgtcaggtctcctgggagtccaactctctcctgagtcccagtggtcagagcattctctgcaggcaagggaccctgtctaagaagctctgttgcttctgaggcccatgtgctctctcctgtgtggactggtctctgagagacccgggataaaagatggagttctcacctgagtcccagggtcagagccctctctggaggccgactttcctcagtgatcctaagatcctgggtgtgctagggcgcctgctgcgtggagagtcatctggggacttgggaccatctgctgattttgtgcccaaggtggcgcagtgcttggaaggaacttcagccactggtcaggctgctggtcaggccgctggtcaggtgggtttcctgtgtccctgtccttgctggcccaagtccctctgggttgttttggaatagatgttacgttccactcaccagtgatcccaagatcctgggtaagctaaaaaataacccctgcatttctgagcgaagtgactggtgtgcagctcctgctccagaattgccttctctcaacaagcagccgtcctggtagtccacacaactcaaaatgtctgcttaccctagaaatacacttttagaacaagaagatatttcattccttgagtttctgggtgaagaaatcatagcctagagaagtttaaagacttgttcaaaaacaaagatcttacaagaggcaggctggaactactctgtgatacccagctgcttttgaatgggccacattgctgcacatgtagtcctcctaatgcttagctgaaagattttagaagacatatatgagtcttttcatctcctccacaggcatacgaacagtgatcgctagcagtaacctatgtgcatccacaggcatatggacagtgatggctaaaaataacctatgttcctccataggcacaaggacagtgatggctaatggtaatctatcttctctataatagctgcactccaagggaaaacttcctggaaccagaatggcagagttgaaagccaagtacaccttgctacacgatacagtggtgaggtatgttctttgccagcaaggagtcaccttttatcgtctctgtacttcttccttataacaaatgggacctgtcttcatttgtcttctctctgaaatctggggcaaagatcagagttcaggtggttttagaaatcactaaagaagaggttgtgaatgtgtgaagaagggagactgaaaaggaagaaaccaggtggatggggtcatctgtggctcatgttgtgggcccagtgtcacagacttctgactagagaacaattacagctctgctaccaggaagtgacaaagccagggtacttgtccacttgtttgcaccactcattaggaattactcctgaagaaaagagctcttgaactttgagatgacaaacgtgcatttctcaggcagagtaggcgctgatgtgtgtatgatgactattgaagatactttggacaagaagacccctctccaattgtcattcagaagtatagttctgtgagagcttaagttcaagtcagtagaaggtcagaagatgggcatccacagaataagccatcagctttgcccagagcctactacttgccactgggtattgaagctatttctctttagtgacaagctatcagtgcaggaccaaaactatgtagtgacatcttctgcttccagcttgtgttgtgaaatagctacttcccctctgctgctcacagtttacctcctccagagcctttacttccttctctacctattacaaaacccaccactctctctcaagcccattggaaaagcacagtgaagcagacactatgtttttgtggctagggctgcaggcaggcagatatgggttggaagtactgaacccacatcgactgagctttccacaagactacattagaagttaagttctctcctcctgacactgtatgtcacacgagtatatgtgtaaactaccacctatgttctgactggaagctcacttctgtgttgccctcctctccatgtggaagaactctagggcctggagacctgtcattgtaaggagcccaggttatgccagatgaacacaatgttaacatacaagagcaccgaagcgtaagagaacagctcccatttccattcccggaaattggaggagttttcaccagtattgctctgcttgctctctggcacctaccatagttcctggaacatatgaggctccgataaatgtttggctggatgccactaaacacatgacacagtaaagcgtgagaaaatagggtaagggaagcctgttacctcagctaagacagcctcaatcctgttttaggacatctttgcaaataagctgaaacctagagatttttcttggtaagaacatttaatagaatacacacatagaagtaggtgttagctttaaaataaaatagcaaaggcctgcctatggctgctgggtaggggatcactaatgtgagggtgtctgagacagataggccatgtagactataagttgggtgccagtactagtttgtaacatgcaagacttctggaatattcttgggatcagtcaagtataacttttcttatctatccagatctgcagccacttctttaaaccgggacaaggtcacagaatacagctgggtttttaggaactctcttttctgtgatagtcaagactatttttagccaagcatcagggcaggattaaaagctgattaatgtgcataattttataggggaatttttcctagtttcccactaatggctgttaaaaagagtgcttaatgtcttagatctgtaatgaaaaaagatcttggttcagtcttacttagagaattaaaagcacaaaaaaaaaaaaaggaaaaagaaaagaaaaggaaagaaaaaagaaaagaaaagaatttctgggttatttgaggggcccattacttttttttttccccttccttgggagccctggtctttcttcaaagtcagagggaatatcctttggattacttgcctctactctgcttctgcttgcccctactctggatctagggacctctggaggaacttatgaggggacactgcagctgactgtgtacctctcccagctagagggtgggtgactcaggctagtcgctgagccttgttcttgccagtgctgagacttagtatgactgatcaaactgaatccaggagtaggaacatctgtgacatgttcccatcctacccccaaatcctctcaggaatacggggcggggggaaggaggggtgtcctgaaggtacacacgtcccccctatcaatatctcaatgtctttgaaacccagcacgcaggagtctgaggtgcagctactggagaacgccaagcgcttcacggagcagatccagcagcagcaggtctgtctgcagcaggccgaagacttccccaacgtcttcaccactgaggtctgcaaacttcgggagcagctgctcaagtaccaaaatgaatacacggcagcgcaagaaagggagtacaatattcagtacaggctgactaggtgagtccccgggcgccctggagacagcttcactgtcccatagtctgtgcaggctgactaggtgagcccccggggccgccctggagacagctccactgtcccacagtctgtgcaggctgactaggtgaggtctctacttgttggagacaggctgtttccacatgacaagttaatttgggagagggtttaggtataagaagtctgagctaacaattacaagcccggttacatttccccttggctcccttcactaaaagatcacacaagagctgggcaaagaactctggaaactgaaatcccttccatgtttggagctttggaaactgctgggaggtgggaggtggggggagggaggaacagagcggcctctttgctctcctgcccttcctcttttgtccctctcttttcctgtctcctggatagctgtggctcctgacatcatgttgctaggcacccaggtcacatcccttcactttatcttctaacacagcagccacaggaccctgtaagttaacttttgtcccttcttactaaagaaaagtgacatcctcatggaagagtcatttgcttatacagacctagaggggactcactcagtgaagcaaagcaggtgccagtgggagagtgaacctgtttcccaaataccccctgcttccatggaagttcagcttgcacctctgcatggtgactggaattttgagctgtgatgtgccagtgctgtgcctgggtgctgggaagaaagttgaacctgccctcctagagtctgtttctatttaaggtggagagctttggctatttttaacagtatgtagaattcagacactacaacataactcagccctgcatggagacagcaaatgcctgagtggcttccaggcaaccatgcgaacccccggaccttgagatttttccttctggcttatttttttcaactgagagatagataaaggaagcagtttaatgaacagaattctattcagaaagaaaaagaaaaataggcggctttttttttttctatgtgtctttcagtctaaatttgttaggactctccagatagaactataaagggaaaaccagctatttccgtgagcactctttcagctgaagaaaataatgaaattaaaacaattggtggttgttcattagtcttgcaaataggaattcgtgacattttgtgaaagggtacagaacacataagtcagctggttttttaaattgtttaaaatttccaagtattcctgccaagaaaaaagaattggggtgggggtggagggtttcttgacttttaggtatagacaggcagactgttcaccaagctccttaagataggggaagggtggtgtattgtcacttacgatggatgagaacaaaagcatgtggcactttacagtgagcagacctcctgtatcctctaatatcaatatctccagaattaataagctcatctccataaaaacaattttgttagcaaagggaattccagggaagaataatgggctttgtgtttgttgtctgttgccttcacacacttgatattatgtggtacagaaataaatccactcaacactcccgggggaaaaaaagtaggcatttccatccatagataaaaataagcaaagccaatgagagaatgctattcatccaaatatacagatgatgttggtcagttcagcacagtaaactatcattgtattcagggcctaaataatacaagcccaagtggccaacatcctctaccccagcatcttcaggaacgtctgagtcactggtgactggcaagagcaacatcaagttacttttactttggcttctctcctcctggctgctgccactgctggctcctcctgttccatctcttcctcttcttctgtctccttcctcttcttatactttttgagacagggtctcaaaaaccagaccaggctagcctcaaagacacagagctctgtctgcctctgcctctgcctctgcctctgcctctgcctctgcctctgcctctgcctctgcctctgcctctgcctctgcctctgcctctgcctctgcctctgcctctgcctctgcctctgcctctgcctctgcctctgcctctgcctctgcctctgcctctgcctctgcctctgcctctgcctctgcctctgcctctgcctctgcctctgcctctgcctcccaggtgaattaagggcatggccaccaggcccaacagctgttttcacacagattaagctttttaatagatgctaatggttagtaaattgttttgattagttaataattaatctgtgttacacagttttagtttagggatcatacttaaatatagataaataagtagttaaatcatactgcagagagcttattttgcaaccaaggaagttgttatttttctaaaagctttctctgataaaggttccaatattctctccaacgttcccctttcctgttgccttttgagtttccctggtttccagtagttcttgaaatttgggcagtcggtacaacttgtttcttggtctaactctgacattttctgacaagctttggtcagttggggaagcaaggcagtaatcagtgacctccagcatgctatggactgagagcagcaaccctcaagctgggcatgtgcaggaatgtcctggtgtctgggtgattctctcagtttcagtgactagtgattgtagccttcaggcaggtttgttcagttaggagagaacaagggttatttgaatatgaggctaagagttaacatgtactcactctagtatgtggcatgtattaccataacaaaatccagtcttgtcccagcaatgccatgcgaaaatgaaaatctaaaaaaaaaaaaaagtaaaacaggttaaatgtaatctgtcaacattgtgacattatttacaaatgtaaaaaattgaacgtccctcggagctcttgactctagctgcatatgtatcaaaagatggcctagtcggccatcactggaaagagaggcccattggacacgcaaactttatatgccccagtacaggggaacgccagggccaaaaagtgggagtgggtgggtaggggagtggggggggggtatgggggacttttgggatagcattggaaatgtaattgaggaaaatacgtaataaaaaaattttaaaaaaattaaaaattgaacgtcatctgaagttttgaaaagctggttgtctttcagcaggttgtattcctgtattctgttgcctggcatcaactctggagtccccatacctgtcacagccagaactgtgctggggggaagtacttatctctggtttttgtttttgttttttgttttttgttttttgttttttgtttgtttttgcacaacctggcaaaactatggagcgtagaaatgtgtgtagattcctgcataggataggcctggtgtgtgataaataatgcttagaatcattttatcatagtatctcctcccaatagaaaaccctgagaataactattcaattactaattgtggaatctgtttagcaactaggaaaacattatgtaatttcgacaaaaatacactcaaccatgcatatgcagttaatataattttactaagcatacatggaagaatgaaaggaccaccatggtacacagtgttattctttgagaatagaagagtgcaccttttaaaggaaataaaagtccctgtttcttaaaggagaaattccttaataggaatacaaccagccttcacagtcctagataactaaccattctgtttgttcaaagaaaacgccattttgtatctatttaaagagaagactgcaagcccttatcttgggttcatgttagttaccaccattgtttccttcatcagcaatggctggcagcactcaaacaccccctggtggcagcatgcccaaagtgctgtgtagcaggtgaagggaaaagataagtctaaggaccaagtggtaaatactcaaaactgaaaaaagtcagcttgaatctgtgctcatttatattaggttccatgtgtcaggcatcatgaaactatcattaatgtacatcattaccaatgaaaatatgctagaataaaacctgatgcacagatgtgtgtctacccgtggctccttgttcctggatcttctaattggtaggatcggtttgattcagtatgaccacaatgctccacccagcccaaatctcatcatagagttaagtgattctagatgctttaagtctggctgtgttctcttgctgaccagacacagcattgcatggagaaggcgctgcgatgataagactgcagcagggggtggaatcgttggagaaggggaagcgtcagatagccctgtgatcaggcatcagagcttgagtgagtctaatggcgcttttcctgtccactctagccctttgaaggagaggcagggcagtattagatggaattattttccatctttcacccagaaagtcagagccaactagacttgggtgttttaattctcccaggctgcttagattctgataaaaccctccaagtttaccctagagatcaacagagaaaaatccaactcttctgagcttcctgatgaggggttagacaaagcttatggatataaactagttgctcatgaacttcctggcttaccctcaagctgcatatttgtagatctgatcccacacagcccgcagaaactttgagaactagctaagtggtcagtcagctctccaggtcccaacaggaaagctctagctagcaatgcaaaggtgctgaaaattaaatcagtctaaaaaccatagttgccagcagcattggctggatcttttgacctgacctgaactgaaccatgtctactaaagccaaaatattaactgttttcatgtttctgagtaaagcctagaatcccatcacataaccattcaacagttttcccatatgaagaaccaggcaaagagagctcagcttgcctaagagacagcagatgtcagcctgcatgctagaggttcctgagttaagtgacaaagacctccctgcagcttttacatgcacacaccaaaaaacaactccaaacatcaagactaacggaggaacaaaagtctcagaagctgcatcttaagaagaacatctctcgatgtcatttatttccagctgattcagtttttcactacaaaagtaaccccaaaacacagtcttagatgcagccaaatacttctaagttgttcatgtggggattttataactgagaaatacagtaactgaaaagttaaacaatcaaccgatgggtgaacagaagattgaaagtaagaaaagtcagtgactccaagataaatagaaaatgctctgtctggaaaacagagagagtaaagagagagaacctgagaagcccatgggacagtagcaaaaagctctcacaccgcaaaagaggcaagaagtggagaagactcaagagtaactccccggcttgtgcacttggacacgagatggggtagacaatgtgaggcttcagaggggaacaaagggactctaactggaaaagtctggctttgtctaccaagagttgagaagtgaaaacttgccagttgagagaagttccaaggctggagatactgacttggaaatcattgcttgtcactggaactttggaaacagaaaggggaatagaaaggttaggctccagtgcctcggggaaacaatagtacataaatcttactgtggctgtagaggaatgtgacgtgtatttatgacctggtgtgatagtgcacgcctttaatcccagcactcagaaggcagaggcaggtgggtctctgcgagttcaagaccagcctggtctgtgtaacacgttccagaacagctagtataatgatgatgagttgatgatgatgatgatgatgttgatgataataatgatgatgatgatgttgatgatgatggtgatgatgatgatgatgatgtaattattttatttacttatatcccaactgtggccccctcctggtccccccttgaagagttcttcccctcaccccctcctcttcacctctgaggggatgccctccctagatatccccccacccctggagcatcaagtctccacaggattaggtgcatcctctcccactgaggtcaggcaaggcagccttctgctacataggtgccagaggctttggaccagcctgtgtttgctttttggttgggagtggccctatctttaaaaaggggggtggggaagggaaaagtgtgtttctcgttctgacatagttcagtgaaagtcaaacagcccccatcctgtgtgcttgccaagtggtttccattcagtgtggctgggaaggcaggtgacaatcaccctccattgtccccagtccaaatgcaagggaagctataaaatgcaaccttcttatgtactcaggaagagggaaggatatgacagatataaagtgtgtttgtcacagggactaaacacacatgctccaagagcctctgcttagtttcttctgctccaatgctctatgtctctcagtggtgcttctctgtaataccattcctgaggaatacaaatgtcatgtaaaatgtgggagctcttgggatgacccttattcacagctgtgaacatctgcagggtcttcccttcatgatgtccatggtactttcccaactcagatgtaaataacatgaagcaatgggtcattcttccagcagctctatttctctgtgtgactctttatttagtatacaaattatgtatttcaaagaatggaaataggaatcaaaccaacttggaaccatccgctatattcctgctactaattatcaagtgccaactatcttctagcaatggtggcgcagtgtaaaaagagcaaagtctctgtccttgcagagctaacacatgacaaaataccaggcagcgaggagcacacatggaagaataaaacaagcctggtggggattgttagtactgtgttaggaggatgatccagagtaagccaggcagaggaatcgggcaggccagagagcctgcggttggaacagattcaggaagaccaagttggcgagagggaaatgtgtcaagcagcaagactggagaggcagatgatgtggagtttcaacttggtccaggtttgactagatgttattgagcagaaaattgatgggatcttgttcatgttgctaaaaatcactgaactgacggagggttgaatatcaggggcaagggtgaagtcaggcaaggcagagcctttggaaggccccagtagtaattcaaggcagaaacatgtagacaggaaaaagtccagagcctgcctgggaggagtcctaatccacagggatgcccatgatccaggacacttataataacatacccagagagctggcgtattaggtacgaacatatgttgctgctggagtgtgggcagaaggaaacacctaaaggccaaggagcgtcagagccatcactgagagaggctaggatgtgaggagacagcctgggaaccctctaagagagagggcactaggatgtgaggagacagcctgggaaccctctgagagagagggcactaggatgtgaggagacagcctgggaaccctctaagagagagggcactaggatgtgaggagacagcctgggaaccctctgagagagagagcactaggatgtgaggagacagcctgggaaccctctgagagagagggcactaggatgtgaggagacagcctgggaaccctctgagagagaaaacaggaaggcgcaggacagaaacagcttactctttggtacattttgtcaaacatggtattttcttttggcagcttaacagaagaaaagagtatcatattaaaggaatttgagaagatacctaagccaggagtaagtattagagtttattaaattcagctgtattcaaaaatccctttaaaaataatagcacaccctgagacatttgaagcaccaataatccagatgccacgaggaagatggacatccttgtgagcaggcccaagccaggcatgctataggctttctgtgctggtgtctacactaggctgtgcttagtcacaaagcagtacctgctttgtttctagaagaaaataagtttctgtgcctgtcacttaagaacatctcttctgttgttactgcactcagaatgtcctgagcttctcagacctggttcataaagacaacacatcactgtcacaccatgaccaaggcaacatggaaaagaaagtatataatttagagcccatgattacacgggtcagtagaggctttcgtggcaaaaggcaggcaggcaggcgtggcactgcagcagtagctgagaccttatgtggacccaaaacagcaaggcaggcagacatacatggagagacacacagagagagacagagacagacagagnnnnnnnnnnnnnnnnnnnnnnnnnnnnnnnnnnnnnnnnnnnnnnnnnnnnnnnnnnngggaggagaggagaggaggggagggaggggagagggagaggagagggagaggagagggagaggagagggagaggagaggagggagaggagaggaggagagaagaggaggcaatttaaatttgaattttagttacagacttaggtaacttattttaactccttccagcagtatgtaggaatctcaacaaaaactcagagcaggctaatcaatctatccacttggctattattagcagatagcccttctgaatataagaaggtgtttatctgtaagtcaagcccactccagataataaggcagaggaaaccaagtgtcccgtgagcctgacggaggatgctgaggtgctactgtgtggagattcgagcctcctcatagttagccgccgtgtatgacttaggctaaccacaagacagatattcagatgatttgcatttgactttgtcaaatctcaacgctacaaggaaacagaatgtacattttcacagtgcttcttagtatgaaataaaaattaacacagaaaacatttaaaatatgaagcactcaattttaaaaagtacttcaaaaccgtcacatgcttagttaacatggtataatcgcatgctgtgggtgaaggtatcaggcataataagttcccctgaacttcctgggaatcacgagtcttagaacatgtccagtggacacggtggatgcgatttgattttagtcccattttaaagtggatgagcattcacctggactgtctagctgaccattctcatgactcttcaaggaaatagagaagaagacgaggctcctgaaagaaagcactgaggaactgcgcaaggaggtgattcagaggagactggagatcaaaaacctgcgggaagatgtggtgctcaagcagaagcagctagtgagggagcagaaggagctggaggagctgatggagtatcaggttggcttgaaggtacgttgtcgacaacccatgactgtttaaacgtggtgcctatgtggatataaaaacctagggatggagagtagctactctacgtgaccaaaggagctgtcacacaaacgctagggactctgtcaaatgcaacttaaattctgagaatgtataaagggcatgggggtgtttgatcagaaaagacatgtgaaagctcacaaaagctgtcgtaatttgcaggcctagacttggcaaatgggccaccaacatttgcagtgagggtcacaaacacagacgatttcttgaaaggcagagaatgttcatccctcttgtatctgtttgtattgccttatacttgtatgcttgatcccactcttcctttaactgtaaaagtgactaggagcatatattaatgttttaggaagcaattagttgcaattaattttattttgaaaaatgtataataattctcaaaacaatttaaattatttaaagaacaactcccaaaactcattggcctagaaaatactcatgattgtttctgaccttttcccctcttaccacatacccatcttatctggggtataggaactaagaagagagtcctttgccaagaacccagggagcttcagcttccagcacatcgcgtctaggaatctcttccaaggacttgtacctaagttagaagttgtagctttttacttgaagaggggcttcaaattgccaaacttcagccctgtaaagcctggatctgctccaggattaagcaggatcccacagagaagcacttcatcctgtcagtgctgtgtggtgtttagctctcacactcacgtgtggttccagagctcacaatctcctgagcacctcagataagcagggtctctttcattacccctaatggaatacctacagtgaactttccactaatgcatacagcttgcagatcatgaaggtccacaggcttagcctccaaccttggccctgcatgtatgacccgtgtaactgtaggccatgtgtttggtttcttttgttgttggtttttgtttttcttgtctccttcacagtcggaggctgggctccctggaagcagtatctaagacccttaatgtaggaggaatctatggagttcacagtggagtgggatagagctaaagaagatgggctagatactgtttctgctgtagaactctagtcttggcctggcaccagaaagaaccctagatctttaactgaaccaccgaggcctgagccaaggaccatgtggctacatcattacatcattacatcaatcattacatcattacatcagctagtcactggccacagccttctccatacttccttcacctctctcacatgagggaagagggaatcttagaggggcacctgtagctgtcctactctgtcatctgctttttgagatggtaacaagtataatgacctgataaggccagtgtgaatattggaggaaacaaagtgtacagggtagatggtaagaattctacaaaatttagtttttctctcatttaatttgcttgcatagttgactacacaacttaccatgattgtatttctttaccaggatgacgtggtccaccatcaaagtgttcctgtacaaattacaaaggagatagaaaaaatgacacgcaaaaaagtgtatggtttaatatttttattctaaatccctcctaggctacctctcccaaataatgtgtgtctatgttataatatttacaagttataatcttgaaaatacctgatcttggtcccatatgggctctatgattcatgttctttaaaagaaaataatacagcaaatgataataattctatttcaacttataaattctgtttctatggagaccaccagtgacttcatcaaggctggggattaaccatttgaacttaaatttcatggtcccaaatgatgctcagacaaccgcagcccaaatgatggcaattcctccctttgcatagattcaccctcagacaactagagcagacttgagtatgaagattgctgagaagctcttaggatttcagtgatcaaaaagaaatacaagattggtgcatataaaaatattcttgagaaataacgtgattactctagaaactgctcttaaaagaatacaggaaaatggagcagtggtgattctaaaacccaaggtcaccagaagggaagttaatggagtcaagtctggtcctggaggctagtcacaatgggagcagaaaccacaggtgacagagtgccatctgaggagaaaagagaatgggcaaatgcctgttttcaggagcattctaggaagttatcccctgtccctccctcccctctccctttccttctccttctccctccacctctgtcctcccctttccctcccctctccccccccctctctctctctctctctctctctctctcgtgatgaaataccctgacagaaaacaacttagggaagaaagcagtttatttcagcttacatttccagaacacagtccatcatcgagtggatatcaaagcaggaatttccaacagtaatcatgacacacatagtcaagagcagagagatgggaaagaatttatatgcttctgcctgcttgtactcagcttgatctcttccctcttatacaatttaggatctccctgcctaaggaatggtgccacacacagtgggctgtgtcttcccacatcaatttacttaagacagtctcccacagacaagctcattggccaacccaatggagatcattcctcactgagaatctcttcccatgcaattcaagttgatgaagaaagctaacaatcacacctccaagtatctcctatctttgacctttacatccttctaagctcagtaaacttgtgactagtatatttttgtctgataataggtagagacagcatgaactcaaaataagccctcttacttctgcttctgtgtgtactccctacagagaaacagagaagaaaaatattgtcttggaatctgagttgaaagagctaagtgactctttaaagaagcttgaaaacaaagtcaacactcttgcggaagaaagggatgacataatgaaggaagttgagggcaagcgaaccttactagaagtcaaagaacgagagtatggccaactgcttaaactattggaactaaccaaagagaacgaagcctcctcgctagctgaaaggttgcttatatttctgcacattctgtcatttaaattttaatcaatgatgtcctgaagattcaaaatattaccaattgattgtatgctgtttcaataacaagttgtagaattataagtcaatttttaaccattaattaaatgtaccatcaaagcactttgaaatatttttcctattctttaattaaaatttcctcaattctatgattctgaacttaggaataaaatctattgttgactgtaagtttatggggaactatattgctgaaatatgcaagtaattcagacacttgccaatcagtgagtagtatttctgacataatcccagcattttctggatgagggagatttcatggtgtgattccatactggaatattttacttccgactctgtgtatgtgtgggtggggtatccacatgtattcatgagctcatagaaatcagaggccaacctctgtgtcatccaccttgtcttttgagacagagcctctccttaggacctcggactccctgattaggctaggctagctggctagtgagctccagagatctggctgtctctgcctccccagcactcagattacaagtgggttctatcagttaaagcttgttacatggatatagggggctcaaatcctgtttgtgtggcaagccttttccaactatagactctcctatcccctgacttttcttaaatgctagaggttgaacctgggactttgccctggtaggcaattgctctaccactggcctttactttatttcttacgttaaagtaaaatttcaaggaaggaaactcgaaacccatgactccccagcctatcattacatttaatttataagattatacttctaaatgataccaacacacaaaagtagctgatttgggtttcacttatggtttatggttgtaatgtgaaaaaacttctgtgtataaccttgagcatgctgtctttgataagcttagaaaactgtataagacaagtcactttgatcttcacgcttgatctgaacagagggatcttggatatcaatctacggaactgtctcatcgacaagcagaactaccatgatgaactttctcgtaagcaaagagagaaagaacgagattttcggaatctgaagaagacagagctgctcctgaaagtgtctttggatgcgctcactcaggcacaagccatgaatcaaaggcttctactagaggtggatatgaaaacacaacatctccatttgtttaagctcagggctctctatgaaagtaaaagtgttgtgcttttgctatcaatagaaaaaaagggacagtggggtggcaatttgaagatgtgttatccccttagactgctgataaccctgtaatatttcccacatctttttctagcccaagactagtcaatttttttgttttgttttgttttgttttgttttgttttgttttgtttgattggcagagggataattggtccagccaatttggaaagagcctagacaataggcctctatgcagtatatagtatatagtatgcaggaggactaagctagatatttgggtttaaagagtcagatctggcagttaaggagcaaatccgattgcataaatgtctatagttggttggccatctggactactagctaaaggacccagtatcaagctgcctgactagttttgtgtaccaccaaaagaggactctagtcaggggatgcttgaagtaatgggatatcatttgactacttctattcccagaggtatgcccttgctacctgggagtctcgtttctttcagacagcatctgctgtgcattccccatgctcatggaaaggcagagggtccttcagagggctgactccttatgttgaaagctgtgttggtacattctttgatgaaaatggggtcaggtctctgaaatgtgacagccgatttgcacagaacccattctctttagaattatcgtgttctgggatcttgtgcatgttcatgaccttggaagtaaatagtcaactcttgtagacatgtctgaacctaacctgcacctggttttcttctcctagattcatggaaagtttacattgcttgtgccctttgcatttaagaagtcacataactgtgtcaggccagtgtattgtaggaagaagtgacatgccatttttagctcaaggcattttgttgccagtgtgaggccttctggctctttctattgcctgtggtaattgtggaaggatgttatggaatggaagtgctgtaaggtgggaggaatactgaaccatagaagtcttgttactgggctcaagtgatgatagctcagtgattaagaacactggctccttttcagaggacaggggacaagaaattcattcccagtacctacatggtggttcacaactgtccatagctcccgttctggtactatttcctttcagcctctctgtatccttatttatgtgtacctcatatacaacacatactcttacagtctggccagagaagataacaccttttcagtcttatgtttagctcaaatattaacatgtaatgtaattgtaggcagatttggactatggccacacaacagcagtttctttgttccatatgcttatattctatcttctctcctttgtctcttcttttagattcaccagtgttcactgttattgttttcacattttagatactgactggttgggtttacattgtccttatcctttcaatgatttactggaaagagtagaacagtcatccttgccttagtagagcccagtggaaactaacactcttcctgttcccaaatggagcctttgaagactctcactctacttacctttgtaagtctaacccctctaaacacgcttttagcatcactttgaaagttatttttattgaaaggttgactaatttacaagatactgcttagcctagagcacaacacatcagaatgttaaactggaactctgaacacacagacttagaaggaaagaagccctggctttcatcaagttctcttcttaattcaatgctattgcttcagctgaattctttgagatctcttcatatagtatgcaacgtcatacagcatgccccgtgtttctagtccatctgctggtctcggggaaagcaagcatgccttctggtgggtccctgagaatgagaatagaaagcaactgtgtctcagaaaatgtgttatagaaaatattttctcctcaggagaagcatagatttaaaaatgtctaattggatgtagaattagttttgacaaatgattttataatttttactggagaagacaagaatatgactctctttttggtccatctatataccacatggttggttttgttttgtttttgtttgatttgggcttttttgcccctccatataccaaatattgtcatgtaattttagatacttaataacttggtagttacattactataaacaagttaggtctccacatacctgagtcagatagtaaatgcacaattgactctgttacaagttgtacatttctgagacgtcacgaacatcctgactctcgtttgcatgttttccctgtgattgctagtttaactccaaactctgctcaactgcacacatttcctcaagaattaaatgcacacttgacaatctattcatttaatttttgaagaaatggtttctaattgttgccactgacttctaaaagccaaagggacacaccccaatagctgaataagttgagttatttcacatttcaacaaaggtgaacaaactgtagaagtcagcctttgggcttctggtatgtgttagggagagagtttaaggaaagagactctgtcatgagtttacatgttgccagaagatgagagtaattttgcttgactgtattaacagatcatagtaatcaaaagagaaaagactagatggcagaaagctgtagttggtagagaaggctgtaagtggagaaggtataacacttttgtggcttgggcaatgttcatattttggtttgtattcaaacacaattatggagtggttttgctttcatttcattctagtaaaatcacagaatggctttgtcttcaagttctgtgaaattgatgatgtttcagtgtcagtagcagttaagttcttggacccaataacccattcattggccactgcccagagcgcacaataatcagaaacaaggaccatcagaccaatcccttccactggacttttcatacttacattcaatccagaaaggagagcaattgtaaacatgaaggtccagctagtctttagccttaatttagttatctgattccctgtggtctatgatttacaactagatcctcccacaaattcaaaacagagtctcaaaaatgttaagaaggtttcagataaatatccaatgattacactgtatgctgaggttcactagtctcaactgggatgtttactgcaaaagaatgatgtctaacatcctaacttttacaacagtctgacttgtttctcatgcattgaaaatatctataagaacattgcccagccattaacagaaccttctagggagcaacactggtagcaaaggtagagcaggaaagattttttttatgtagatctactgtatgggtacaatgaatacattttaaacatgaaataaaaaccaaatctaagaactaagcatacacaatcatataaaacttggccacatatgcaacttggggctcaaagttaatcctaagtgtttgacatcatctttgatcccaaaattgagaagctatttttctgacacttcagtggagacttcagcatgacctttaacatgttttggagatgaccgttagaagatttcctttcaaaagacagcaattaggtttgcagcttggtttcagtgagtaacagaaaactagtgtaactctcctaagcaagagaacattttgttcgtataataaaaagtgtagatatgggtacatcaagtaatttcacatcacaaaaaagctcagaattattttagctctctcttggccatctttactgtatttcttctcaatggtcacaagatgaccattccacaagaaagtgatgaccagcttggctgactttgtcttttataaatatgtttatagtatttctctgaggatttgccacatattctaattgtattcatcccaactttcccctccagctcccccaggtccaccctcctcaatcctccccctccctctattttatgtcttcttttcaaaaatctttttggaagtcccagtgtttcagattcctggttctctggctttcacagtctttctggcttcttcccgagtctcagtggagggttctgttgcagatgtatctattggctggtcctggccacctctcacttggttgctcactgcagtctggccagctgcagccttccatgatgttgtacaaaggagcttcttggtgagggtgagagccatacttctccacggctatcatggcaagtatttagtgtgcagttagacactatcctggcttaggaaagaggtggcataggttttcctctggggtcggtgacctcatcagtcatgagtagtcatgaaacaggcatgaattccctcgtattgagggtcttaagtgaccaccccaggatataggccactattgtacctttcagaatatcttgacattctgatggttgtggttcacaggcattacagctgcataagactattgattgcttttctcccttggcagctccttttgttactatgagagctagttcttggggtagaggcttccagctcaggtccagctcagttcctccaagtcctgtgtctgaagtgtatgtggtcagcaatcgggtcttgccttctttctctgaaaggcaatcaaggacaacaacaatagcctatatagttttgggggtagatctcttggactcctctgatcagcaactcaaaaggtttcccatacctgacacttgagtttttgctagatggtctatagtttgggagagaacattgccacccccaagtactataacttcagtgaacacacacacacagcatggatagatagatatgctatgtaattttttaaaaaataatatgattccctacggcttttcaaacatcaatggtatcatttatccctccttctttcctttctctcttagttgccccgcctgcatccccagctaagcctccaccccaagtttttcccatttcttctctcacaactgtgtcctactattgccctctttggagcccttctccatggcctgctttttactttcctgatatctgcagttattctgggtgacacactcacatctaaagatcctaagctaggaactgcagatgagggagcctgtggcatttgactttctgggcctgagttacctcactcagtctttgaacatgaaaagagttactttctggggaatcctacccaggattcttcccatttcactggctgacacagttgcctagctcatacagtcacccccagactctgtgatgaagtctgaggactcctaggtacttgcaactcaaaacaattctgaagaaaccagagggctgagttttatagagaatttaaccagaatgcaacatatacatatagaatggtcaatgaagaaaataaacatacatatacattgtgttagaagaacacaatccagaaatcaaaacttagcacaatgcatgactatagtgatcatccttcattcagaatgctgaaaagaatcagaaagaatcagctaggagcttttagttgacaaactaagcatttgtgattttctgtcatagtttataagatttcctggccccaagtagcactctgagctatggtttccagcccgtgagagtagagcatggagaatagctcattctaagtatgtttgcagcaggggatgcttgcttacctctccatcccatatcagagacatggagccttcctcatgggcatctcattttgcccatgcagtcttcctaattattcaaggttacactagtttcccctttgttttgctttgctttgctttgcattcatctgttcattagaaacatgagagtttatattactgtatgaatttcacaagaccgtatttgtgcttcatgacagctgtccattgtagatgaagccatgagaatcaggaagtactgggcacctgagggcacagatggtggtgctggagaagcactgagttatagatgatgaccaggggacccaaagatcctgataaaccaccaagcaggatctttcccagttgtgcgtactggcttgggggcaaccctggtgacttgaagaatgttgtcaccagaggaaaagagccacatcaggtcgtttgctttctttcataattgggtccaaagtagtcaagtaggccattatcaccccagggtgacccttccacagccttggatgcctgccttccctcattagctactatgggattccttatcaaatactttcccccaagtattttaacacaggcagaaatacaaactaacacaacaaaaattataagggcaaaaatgtagatctcaacaacaaaaagattaaggagctttttctttaaagaattttaagctaggcgtggtggtgcacacctttaatcccagcacttgggaggcagaggcaagcagatttctgagttcaaggccagcctggtctacagagttcgttccaggacagccaggactgaaactgtctcaaacaaacaaacatacaaacaaaaaagaaagaattttaatttactcatcaaactatcacattgaagtagtgagttatactcatcatcgttaaccaagaactggttttgtttggcatagtttcctaagtaaatacagacttggtaattataataccctcgcataaatagtccaactcatgcaggttcctcagttccagaatcatgaattcaagaggcagcagggtgtgctagaaagatcacaggctctttggctgacagtgtgggcgtgcacctgcaccaggaaggaaggtagtatgcctttctccttcccagacccctggatgcctcctgcctgtgtggtggatgaataagattgtgcatccaggccctcagatccctgcagcaaatttaggcaatggttaatacatgttagatattaagatttatttataaaggttataacatttgcagctaatgtatcatgcaattttggtagatcttcatattatattttgctttgattttataaagcacagccagagtagaaaatctctataagattgggaatcatgatttgcctgccattttaaatatgtatgtaatggggttgactccagaggctgttttcataatagcacctattttaaattttgatttccagatggaagctatcccaaaagaataccttacattgcctgaacgaaggaaagagctccacaaagaggttgatctagctaggagaaatctggctcaacaggttaatatcagtcacacttttacctcagaatggagaatgaagttgtgtctcagaaatgctccagaaaaccacatcaaaagaagaatacgtagggggcaggaagcagatgcgggggggatggggttgggaaggcagaaagtatcaaataatgatatacgtgtatatggaaatgccatagtggaacccattcatatttataataatatatataagtatatgcattaatatttagagtaaaaatatgatgttagcgtcccgcttataatgggcctggatttttgtttttgttttttttttttttgttcttttatggggaggtttactaagggttggatgcaatgttcaagcatgctagccaaatgctttaggtgagtgtgcatgcaccgccctcacctccaagttcataagaaaaggatgtggcttgagaggacaaagccttcccaggctgtgaggccaggctgtgaggccaggctgtgaggccaggctgtgaggatttctcagataaaaggctgttgatggcattaaaagtcaaccgtgcttcatcaatatctgttctcaaattccaaacttttgtcagtcgagctaccgttgaggtatttttaaaatataattttaaacttctcctagtcttttaaaagcacagcaaggagaaggtcggtggtgctacccctctagttcccacccttcataaagtaaaggaaaacttggagctcggtctcttaataaacacaaaaggacgaggccgtgctctgtgcagaccttgctgggtttcttcagaaagcgaattctaatcctttgcttctcaaaagaaatctctgtcagaagctgaggccaagttagtggagcagcagattgcacaggagaacaaacttctaaaggagcaagaaagtttgcgggagctggtgttcaacctcgggcgaatgactcagatcaaaatagatgagaaagaacaaaaggctaaggatttcctgaaagcccaggtaactaactgccttgtgtggccacccactaattacgacatgggttcaagggaccctcactttaatgcatcactaattagaaagtgatgattccacatttccttcaaattcagtgaccataaattaaattttccctaaaggacactcagtcataccctagaaaaccaaaccaaccaaacaaacaaaagcaaaaaaaaaaaaaaaccaaaagcaaacaannnnnnnnnnnnnnnnnnnnaccataaattaaattttccctaaaggacactcagtcataccctagaaaaccaaccaaaaaaaaaaaaaaaaaaaaaaaaaaaaaaaaaaaaacaaaagcaaacaacaacaaaaacaacaacaaaacaaaacaacccgcaaccttcagttatcaatagttaccagtctagaggttaaaaacaaacaaaaagaatcacaatgataagaactctgaaagatggcaacttcaataagaatggtgtaagtgtctctagtgaccatggctgccaggtgcataggccacagagagaatctgtaagtcacagagccacagatttcactgtgacttgcctctagacaacctgggagcagagcatttacagggtcatcaggtgaaatcatagagatcaatgcaggatgctcttagctactgctgcatcccaggatttcctcagactcctacaaagtgccacgagcaacatcataaagcaagcacatacacacgcacgcgcatgcacacatacacgcacaaatgcgcacacccacagaagtcactaaaattttaaaactagactcagttattccacagaaggattgtgtctagaggttctttgttaaaagtaaatgaaggctgaggtatatttcaatgctagaggcttgcctgtgcaagctttgttctcttgatgcatgtgcgacgggtaatcaagaggcagttgacacagtacgacagccagtgaaagtctagctcaaaagacacagtgagattgtgtttcaaaaaatgataataattaaaaaaatatgatatgagatattactaaagcagaccttatgtacttgtcatgtgacctaggcgtgggccatgtataagtgtgatctttgttcttgctctgagtgcctacaaggggatgggattttctcactccccagaaagagctcacacctacacagcactggtgggcacaaggatgaaatagattctatagcaaagaacagaggagaaatcattagccacacagatccccagctcttctcaccactctcactgtttagacacactcacacctgagaagtgagaatctcagagaacagaggccagatgaagccgagcagtcgagggcagatggtgagggtcacacaacccaccgtagacagtctggtgtctattacaaaagccctgtggagccatggataattgggctcacagaaaatagatgagaaagaccatagtctcccaggacgctcttagctactgcttcatcccaggatctgctctgaagagtggaggagggttgaggggagcagctaagggttgagaaggtcattgccaccaaagtcgggggttggactggggtcagtctagaacactgttttcagaagcaccgactgttggctgggaagagtccacccctgtgagatttcctcgttagaaaacttcccctcttttcttttccgaaaggttagatctaccagaggtgtactttgttattccaaggaaagaactggtctgttttacatttcagtcacgttctaacagctccagcttactgagccttgtgctatctgtgtgtgactagtccacataagctgaatttcattactgaatggactagatcataataaaacataagacagttctcccttttgaagtatggaaatcataaggggaaagtttctctcttgagtacttcattattggcaattactctatgaaacattatttgtagttaactgtatttccacaagaaggcattgaatcttattattttatatcatacttacatctcttttttttaaaaaagatataaggtggctggaattgagattcacgttgttgtcacactcaagaccatgtaggtccaagacagtatagatgacgctttatcttacaccagctttcttctttgcatgtaacctgcaggttagctgtagacccccattttcactgaaagttatacaaaataaaatcactgtgtatccatactgacttgacagaacaaggacaaatgattttgctctgtctgcccctaatggagggtgactgaaaccactctctcccaggagttctgccagcagacactcaatctccaaatgcttcccatccctgagaaagcacccactaggcattttctatctaaagagcatcagtagtacctactagtataaagtgttgaaagtactatatatacctacatatgtatatataagtatgtacatattatacatacatatatatgtgacttttgaaggtataactgttttctttttaatatatttatgtacagttttacagctagtctcagtatgatgcctattataaaggaaaacacacatccaaacaaatggacagaactacactttaaaacactgcctcagtctctcacaaaattccagagggttcaggtcatgatgtttgtcgaacttcctgtaagtcctcttcattgccctctgtaagcacagagctcgactggctgggcagtgcaggctgcagtcactcctcctcagtagtcctcccccaattatcccccctgtctgtgtggactatttcgtcctctccagttcttctgaaatcttaagtatccccttgtcctagttgatgggaatcactccagctggccagggggtgcttaggaatctcctgttctcctcatctctacaacaagttaagaagaactgacagatgggatggagtggggctcagtctcatctcgtggcttttggtggtggtggttttgatagtgtaagatagagtcttactatgtattgcaggctgatcctgaattcatttcaaccctacttccttggtttcccaaatgctggcattacagacatgaaccattacacctagctttctggttgttgttagggttttttgtttgtttgtttgttttatttctcacatgaatttttacatttcagcgaagatatagtgagattgttaaggaaatcaaatcaaaggaccttgaaatcaggctatacaagaagagaaagcatgaaattcataggaggtaaaaagaatttggtaaaaaagaatcacgatttagttatttgggcaaaagtgttacttgctttttaattttcaaaaaccatctcatgttttcagactcagagaatttgccagcttgtatgatacaattagaaatgaaagaaacaaatttgtaaacctacttcacaaagctcatcagaaagtaaatgagataaaagaaagactcaaaatgtcattaaatgagctggaaatcttaaggaacagcgctgtctctcaagaacggtaggagtcataagcacccacgcttgcttaagggatcggatcaggttacctgatgggccggctggaggggccacggcaacactgaggctgtgacaatctgattgagaccaatcagatgttttatacattatcagaaacagaatctagtggcaatttccaggatcgatacaattgtagttgccaggatacaatgacagttgcaaactttagagagtatttaatgctaatgcctaagatcagttgtcctgtcaagcttccctgcttccttgaccttaaaggaacggacggagacacacagaatgtttgtttactgcctgagcgagtgcatggccactcaggaacaggaaggcatgttgtacccccggagctgtggactctaaccagaaaagcctatgacacgtgcctcccaagacagctaggccaggccaagtccacggttctctgaagcttgtgtccttctaaagccttgtcttctatgtctctggcactctagactatcctgggagtcttcagagatggggaaataccttgctgtagagggtggttgggaaaccttgatttaaccggaaatctgtgtttgttgacactgaaggtccttgccatcaattggtttttgatacatcaataaagttgccagtagccaatgactgaggggcaacatagtgaaaattgtgggagtggagtaggatgcagggagaactggggacaggggtagggggtggagggcagggcagactaggaagagaagaaggggataacagcaggaaaaaaaggccaaccatgggagttttaaggtaagtggccacttccctggttgggcctgggaagatttaggagtgaccagtcattgaattagccaaggtgctcaagcgtgtgtgcttgtgtgtgtgtatgtgtgtgtgtgtgtgtgttttctattcgctatctcagatcgtgtgcacccggccaggagcacaaagtcatgtagacaaaactacctgctccaccttgcttctcaggtaacaacctaggtgtctgagcatccttgctgttctccatctagtagtcacagtttttaatgaatgcaaaacttaatataaaactatttttcctaatgatgaactgctgactttcattgctcgattgagaaatgaagcataaatctgctatctgcatttgaagttaggagacaaatcacttcttggatagcatcccccggttgtaggtttaaggcatgtgatgtgcatatggagaggcaggctacagcagatctgctaagacaacgctttctagactcaactcacagctctgtccgtctctgtctgtaagaccttgggcgagatactctacctctcaggaccctttctttataatcctcctcattagtgtgtagaaccttttgttactacacaataatgacaaatgagtttgtctatgtaataacatcagaaataacacctgagaaattgtagtcttggaaatatattgtttaccacatgccaagatccactggaatcttccacctacttggttcctgatttcctgagcctacataactggatttttctgttagccatcattgcccagatgacttagataaagataatatcaaataccctgattaaaaagcacgattgaaaagggaaatttcctagtcagattcttacccaaaaggaaattagaataccgtatgatatcatccaacctgacccatgtgagtctgcagatccaataggcattgtcaatagaagcacctctgtcctcagaactcggtctcctgaggtgacagagcagaaaaagaccttttcacaaacaagtgtgacacagtggttgacacaatgacagtattggtcacctggctagaggaaggatcccacaacagagaaagtgtgtcctgggaggtcctgggtgagcattgctcttcagacatctcagtattcttgaagagagtaatgatcttccccactgtgccattattttaaaagaaagctacaaaacgccatgctaaagcattccaacaatgtgaccatcaaggagagcatacagaacgatgtgtgcaaaatcactgctaaactccaggaaatgaaggagaagaaggaggcccagctgaccagcatggacaggctggccagcatgatcaccgtgatcgaagaggagatggtgcagctgcgcaagaagtatgagaaggccgtacagcggcggaatgaaaggtaagggtcgcaaatgtggctgggctgagtgcccgggaccctactgagaggtagccatgttctttacccttcggggggagccatgggtttcccatgaagacaagacaggctgcctgtggaagggaaataacagggaggttggggcagttgaagaacaaagtcatctctgaagtgctaggagagtggttctcaaccttcttaatgctgtggcccgtttatacagctcctcaggtgtgctgactccccagccacaaaattattccgctgctacttcataattgtaattttgctactgttatggatcataatgtaaatatctgatctgtgacccgatgggggtcccgtcccacaggctgacaacctgtactctaggctcacactgaattccttctgcatcagctgctgtgagtcactctctgtaacctcgctccatctgagcaggacttggctttatcaacctattctcatagttcattttccccacgattaactaaggcatagaggactgacatatttcttctaagctgcaagcagccacaaacaggatattactctttaataccctctccccgccccccaccaactcagttgcttgtattctgagaaattggtaggtgagatgagggaatgctgaaatgattcaaatttcgtcaagtgtgctgtttcacgtaaagtgctggaacactgggtcccgagggaccagatgaagcattggtgctgctcttgttagcaagggactctgataagaagaagcttcgatagaataaagcataaagaaagaaggtgaagagagcactgaggttagccagggacaatgtgcaccattggagggaagagagagagagagtcagaaaaattaaaggtagcagttacagcaatgtatgtacaggtggtgtggggagatctctaagaacttaagttcttcaaacagaactcgttcaaaggactgctgagtgttccttctggtttaaaatgcaaaaacaaatcctagctggctcctggcacaagcagaagtttgcaggcaaatagagtgttcgaggcccgggtcagaccagaggcactggaggaacaaaacctcactttgtttctatcctgtggcttcctctcaaggagggacctttccactgtgcctgtcagcatggtgacagagggcaggttacagggcaacaagcatcagaaatgtcacttttcagagacccctatgcctggcgactctctccagagtcgcattcctagactcctgcccagcagcttctgcccttgcctggcaagtctgacccaagaaaagatctgcagattgggcttgtgttttgctttgttcacatgttgggagtgacctcccctaccccaggggaacctttagggtttaccaaggccactgtggccagcctgctgcacagctagccttagattagagatgccaaccctgcttgtccctatggaagacccagtgtttggaccttaatagaccaagctattagaatgtatcactatcccctgaaattctgttctgtatgctatgagcccaaagccagagggaaccacagagactaagaaatagtggcctcaacaacccacttagactcctgctctgaatttgaccacagtggtgttcagctgatcgagcgggaagaagaagtgtgcattttttacgaaaaagtgaatgtccaagagaagataaaacttcatcaggatgttgaaatccacattctggaagaaaaaatccgattcctaaaactgaggattgccgaaaagcaaaggcagatttctgtgacacggaaactagtgccaatcaagaagtccctggatgccgacctggctgtgatccagattcaggtgggtgagcggccaggggacacttcctcaggccgttggcttggctcctggccccttggagtttatagtggaaatggtttcttgaatgggagccaagctgcactgctggtgataacttccttgttattgtgtttgaagatggatttgaatattgctccaggatggggttttgagaatctaagcttctctctccccctcnnnnnnnnnnnnnnnnnnnnnnnnnnnnnnnnnnnnnnnnnnnnnnnnnnnnnnnnnnnnnnnnnnnnnnnnnnnnnnnnnnnnnnnnnnnnnnnnnnnnnnnnnnnnnnnnnnnnnnnnnnnnnnnnnnnnnnnnnnnnnnnnnnnnnnnnnnnnnnnnnnnnnnnnnnnnnnnnnnnnnnnatgctataccaaaagtcccccatatccacccacccccactcccctgcccacccactccccctttttggccctggtattcccctgtactggggcatataaagtttgcaagtccaatgggcctctctttccagtgatggccgactaggccatcttttgatatatatgcagctagagtcaagagctccggggtactggttagctcataatgttgttccacctatagggttgcagatccctttagctccttggctactttctctagctcctccattgggagccctatgatccatccattagctgactgtgagcatccacttctgtgtttgctgggccccggcatagtctcacaagagacagctacatctgcgtcctttcaataaaatcttgctagtgtatgcaatggtgttagcctttcacttctatacttctataggctctcactgcctgtggcacaatcctgtcactggtatctctggttccaccgagatgtagcatttaggctttctggcttgttgaagcagggtcttgcaccctgtatagcccaggctaatttcaggctcattgcagccttcctgtctcagcctgctgagagctgaggtgacagactgtgctaccacacccagcctgacggtcagtgcttacaccctctgaagaaatggcaggctcttgagtacgcagtcacacacagcaggacctttatttacctctgtggttcccaatagcagagactgaaatgtgaatatgtctactttgttcacatgtaatggtatttttatgaaagcataaaaatcaatggaaccaattatttgttacccacacttttccctcacggactcaagactgcagcaacagtcatcctggtttgggtggattttttttcctagttataaaattaacttcattctttaatatattcattgaagaaacttggtcaaacatatcaaattatatacattagtatatacaacagtggagaaattggaaactcagcagacatatgtaaaagagttgttgatattttatatgagaaatgatactatgactaaattttcccttaaaactcttatgttttaaattgggtgtggtatgcaggcttgtaatcccagcatttgagaagatgaaacaggacgattcctgtgactttgtggtcagcctaggctacacaataagaacctctataagaaaaaaaaaatacaaagaaaaataaaacggacttcttctgactcatccagatgaacccgtgtggtggtggtgggggggataactctgacctcatcctgcaggtgcctgggggtagagcagaggcatggcccgactgacaacagccgtgttggcagctgccggagccgggagccgagagccgggagccaggcgtgtggaagctcacgctattctctcttttggacatttacataattcacaagatttaataatgagaagttaatcattcttagaaatgatcagctacccactgtgaagtatgaattcagttctatccaagagggagctgttatgtatttaatgatagtctctgccacgtgtgacggcgagcctttatcacattggctgtgtgtaacctgagacctgtgggctgtgcgtgagcttagggttgatatgcggaaagccacctgttcactttcacactgcacccgacatgtgattgtatccacactgactgtgctcctaggaagacaggatgcgaagtgccaagctctgggcaagccacacctacactctgccctccaagaccgagttcttgacgcttcctgctgtataagagttagttgttttgccgtgtcttaagtcttcctctattttgcatcattttcagaattctattaagactacatttttttttttttggtcttggttattttgaaacaatttttaattgttcacaggggttgccatgagtcatgttctgctgaaccttgtagtaataattccattttaggagtcctggaaatctcatgagcaattgtaagacacaagaacattgcttttataaggaaagtgaaaaatatttccctaagtgcccagggggaaatttaaataaaggcactagatttatttttaaaggtttctttatttttattttatatgtatgagtattttggctgcatgtatgtatgtctgtaagtgcacacaatatgcttggctggtgcctgaagagatcagaaagaagtcatgattttctgaactggagttacagatgggtgctgggaggtccttggcaagagcaacaggaggtgctcttaattaactactgaaccatctgcccagccctgtggaggttctgataagaaagtatcatttatttcctagtttcttaattaagaaaactatgtaaacattaagaggcattactgataatttctgtcactattttaaatgttactacttaaaattcttattatagagaagagggctaccagttagaattgtaaagctctatctgtagctcgcctgctgtggtctaaagcgtgaaagcagtggttctcagcctccctaatgctgcgaccctttgttgctacttcacaactgtaattttgatcctgaacagtgtctcagtgtctaagaccatcagaactatgtgttttccaatggtcgtgacccacaggttgagaaccgctgtcctaaactatatcattcatcccatgggatcaagcctcatcttgccatgtgccaaatgagaagccaaatgtttctaaaaaactcttacacaatggagggaggctgagaacaaggcctttgggtgatcatccccccccccccacacacacacacactctttaaactaagcatggctattattacggtcactacccgatatccacatctcagcaattcaacagggatgatctagtcaaaggctctttagcaaaaagcatacacgtggctaagactgttgctcacacagtgcatgctgagttaactgataatttcctttttggggaatcactgaggccactgccagagaggaatccagcttgttacatgccagctgccccacctctgaaacacctgcagcaaggcagcaaagaccattttgaatccttaaccacacatcatcccatgaatgtcacacacaattggaagcaatggaagggcttgtaggaacccagcctcctcccatgtagaggttattgaaattttaccaagcttgagagttaaactgaaagctaatgtttgcttcttttgcaccagttttcacagtgcacagacaggataaaagacctggagaaactctttgtgaaccctgacagcaagggcagggtccgcttcattaaagggaaagatctgactgaagaagaaatgatcaagaaattagatatggtaagagttcttaaacacccaactgcttgctcacaggtattgcaaacccatcatcccactagacctcccctacttgtcatggagtcctaaatcctaactttgatagatatttacctaaggaaggaaaggtcctgtagtttcaggattcagaagtgcccttcattcctagcccaaaagaaattttgacttcttgaataaatatgttcatttgtcatcctggtgggaacatctgggaagaatggcattgtgggtaccaaatagaggcagaggtccatagcccaccctgggaggagagcccctccctagcccgagtgtcccctgacatagttagtacagctccagagacttttcagaggtattttaacaacaaagaaagcaatgtgtctctgtcgtggggtagaggactaatggaggatgaagaccatgccttacataagtcatttttttaactcctactgaaattgtttccaactgtagctggaacttcagatagccaagaaggaggagaagctcctggagaaggatttcatctatgagcaggtgtcccagctcacaaacaggctcaaaggcaaaactcaggcttgcaagaaggacacactgctcttagccaagaaggtttgcctcaatgacagaacctcccctctccatgagtgatggaacccccctctttccctgagtgatggaaccctccttcttaagtaacagaaccccctctctccttgagtgacagaaccccctccctgagtgatggaacccccatccctgagtggtggaaccccctctctccctgagtgacagaaccccatccttgagtggtggaaccacccctccttgagggacagaacccccatactctcatcctgagtgatggaacccccactctctccttgagtgacagaactccctccctgccccaactcctgctgtccccttccatgctttgctcttaattgctgggaagcactgagagacagaggtttaggagcctagaaacaaatggagcttcagtccactcactccccaagtgaatccacttcacaggaaggaagcacaagctttccaaggagagtattttatttcacagggcaacttctcaaatatactaatccttagctttgtagtttgtgtacaaagtaaaaccctttctgttttttgagcagaaaacatcatttatccagcagtctgagtaggaattgctccaagacagtatccagccaaaacccacagagggacaggggcaattgaagagatacagcagtcacacaattcccaggctggcccttccaagtgacatcagggctgcagatgtgacacagctaggttggcacccactaagagcaatgctagtgggagaggctggtgactaagggtggcaggaccccaccgtgcctggtgggggaaggatggaacactcaccagcttctgtgacttttgggcatcctccattgagaacttttaaccacccagcgatagccatgtctgtctcgccatacaggaggcagacacggtgtaggggggggggggtgcgggggggagtatcacacactgtctagcagggtaagaaagaagaaactagctgaaggtgactgagtgtacacccacacctctctgactgcccctgccccacctgctgagggtgaaggattcctacaccccagacccggctccagagggtaggggcacttcctctttcagtttctcaaggcctcacatgtaatagactctagacaactgtgcatacatcagccaatagtcaatcgtgttctgcaaatagttttatgaagctgtgtgagaaataactgaaaagtcacctagaaagcagtgaaaacaccgttgtcacgtggcctgtccccttctgttctgctgagcccaatgtcagtagtgtacaatggggcctcataaacagagaaatgatgagatttactgaagccagtgagctttgtcagaatcagcacccttccctaagtgtctgtaaatgtctcttcccttccctttgcaaaatgaattccctgtcttaaaagtcgctttttcattaagagatgatttttcaaagctgatggcagagcctctagaaattatttgtgagactagagaaacacagtgtggccaggaaggccccaaacagctgaaaaggctcaaactgataaacccatgttattgtttgagccagaacttaggcatgaagagcatctccctaccctcctttactcttaaaaacaaacactaagccagtctccatgttctccaacctagaagctagtaattagagatatctttcttttagtttcttgtttggttttagttctcgtatttacaaaaccaaacatgttgagttctgtcctggttagttttcacaatgtgacacaacctacaggcagttggaaagaagagtgtccacttcgaagatcacagtggccttggccattgtcaatgaaggtgtgtcttgggcaatgattgatgttgggggaccagccctctgtggccagtgccatccctagacaattaggtctaggctataacaaaactagcttagcatggcccagcaagtgagccagggaataatctaacaagcagtgtgacttaccctgtggcttttgcctgccctgatttccctcagtaatggaagtacctgacaaaggccctttcctccacacgtttcttttgctcattgaagagtaagtaggagaggttccatccctggagcctcttgcagggattttctgtggattcccattaacctctcatcccttcaggaaaggctgcccacacgggtagccagcagtcttgttttccccacatcctcatgggatagctataccaactaaaccgtgggctcctcgtttctagatgaatagctaccaacaaaagatcaaagttgttacccaggaaatgatggctcttgttgctgagctgtccatgaaacaagccctgaccattgaactccaaaaggaggtgagagagaaagaagaattcatcttctcctgcagtgccaggatagaaaagggcctcccgctcaacagagagattgagaaggactggctgaaggtgcttcgagatgaagaaatgtatgcctttgcgactgctgagatgtctcgggtaagctttgtgtcctgtgctgcaaagtgtggcagtgtcccctcatgacacagtgggccccttatctgaggcctaggaatagaaatggtttgaactttctatgattttcatgagatatttgaggagtggagcccaagtctaaacaccagactcacttgtttcatatgcacctcatatacacaggatgaaggtgacgtcaatgcatatttatgcctatttaattttgactgtaatcatgataggacaccatatatggaattatctatttgtgacatcatatctatcctcaaaaagtttggagcattttgggtctcagggttttggattaggctttcttcaacctgtataagaaagtttcccactctaacaggcatagtctgaatggctggtagaaaggggtttggcatgtagaaaagactttggactagtagtccaaagcaccacctttctccctgaggagcagctgagaaccatcatcccagtcataccctgaactggcatggttgaacactatagcctcccccggcgtgcctctgacaattctaacattggcatttgctcgcaccacaactgacccttctatgtccttctgtcatggcctccacagccatattacaactactacagccttctacagaaccatacctggcacatatcatagagctctatgctacacctttctcctccccagtgaccaaggtcttggtcggtcactgaagccaccagcgagtctggtttcctactcatctgtctaaccccatgatccctcgatagtttaatattataaggcatctcattccaagaagcccacaggggttgcagaacaggcaacagaggtgggggtgggcttcaccctcctctacttgttcagcaaggcctaaagatgctcttttaggacccaggaaaagttaggttcagtgctttagaaaactgaaatgagaacatcttcctttgcaggagtacatggaaacggattatcggcagctgcccaatggtgtttatacaactgcagagcagcgtccaaacgcctacatgcctgaagcagataccgagcttcctctgcccaaaccgtatggcgcgatggctccatttaagccctctgaacccggagccaacaggaggcacattaggaaacctgttgtaaagcccattgaaatctaaacatgtgaaccaacccagcagtcctctcacagagagggcctgagccaagcctcagaccttctatggagaatgagcaccagggttctagggctgctgatgagccaggcacggtcaacaacaatgggttgtttccaaagcagtggcttccttgtacattcaccaactattacctggtaagtgacactgaatgggacatagactacagctgtgtcaaagggcattttgattgttcatgtgtttctttttcactgcttatagttactacacctcaggaatgtacagtagacaagatgctgtaaaagtacaaaataaataacttttcagtgaagtacagacattagagtgttttctttctattagaggaaaaacaggcacccatttatgtgtgcacagtctgactacctgattgaggaaactgctatgtgacagatgcagcccctctgctgcagcagcatgaaggctgtgtgaagagtggtggggacacttgtcactcaagcgatgttacttctgtgagaacaattctacttatctgctcagagattcatttcacccatatgtttttctgatcccagtgtctttattattagatgggatgatttgctcgtatgtgtgaggcccatccttttacatttacatgcttaagctgtttctcctgtgttggtggtagttataaatcccatgtccagctctggcacactgagacatactatacttccattttgctaaatccaacgtgatgttccaagcacctgttctgacacattgggtggggacttaagttgactctcattttctgagtcctgaatttgacctctttgctttgcactacattccaaagcaaaggacatgtgagacccttgagtaagtaccagccctttagctaagaaaggagtcactgcacactgaaacagtccctatggcacaggaattaggaacctctttgggcattaaaaactatatgcagagaaagtttaaacaccataagaatggtaagattttttttttttaatcacagagagactcttaaatattgcaatgcatgctgctagttgataaaaggcaggtgccaccatggactgaagtatcttagattacagtccattgtgtgtgtgtgtgtgcgcgcgcgcgtgtgtgtgtgtgtgtgtgtgtgtgtgtgtgtgtgtgtgtttgtctagccctagaacatgaagatttggggggtttgaggtagaaagggactccaagtggaggaaacaaactgttccaacctttgaaagaaggaggccaaactcatgtcccaaggcctagtgaaccagcttggctgcaagagcgttcatattgtacaaggtcaaaatttgagagtgaagtgccaagggagttacacgctactcttcagtaaacagcaagttagtgaagaattatgagctagtgtcaaagtcacactaaagattacttcatatctgtgtccaataaacccagctttacgaattcacaggaacaatgcaggcgtgaacagaaactactcgaaggatgtaggcaagtgtactgaaaacagcagaaggaagatgaaccatttaaaatacaaattaagtgtactgtcagagttttattagcaaaaaaggatttttaaaaatttaatttgaactaaataaaacctgctgtctccagtacagagtaatttgtaacacaagcaatatgaacagacagaaaaaaaaaaaaaagtgaaaataccgtattgcagcattgctgacttggtggcaaggttccgagcctggctgactatttggagcaaaagggaaattctataggctaggacagtttctagagcacagcaaagattgctgaaaatacggtggatttcatgtgagttagtgacatgtagaatcattaaaatctcgccatgtgaacaggaacccatgaggacagagaagcagaacggaacctggaaagccgagccttaggggtcagcatgatgtcactgcaggagggagatgagaaaggaccgaacgaacacctcatcaggtgtcaggggcctctgcctagtcacactgacgggctcaagatgccttatgcaaataaggctatacccaaaacttagggagagtcagaccaaaggtttcagtatttgaggtggtatttaatgacaagatagtactaaatcataaatataaaattaaatatggctctatctgagccaccacaaaggcaaaggctggtctaagccctgtatggacaaatggttatttgtccagttcctccaaactggacgtgacaggctttgcttcctcagtttcaggttctcctgagatgctcttcccagcactgacctttcctgcctgtcctatgtcctttccagtgaccgcctggctctcactgttctaggcattgtcccctgtgtttgtattagattctttagtgcaacagaaccagctccaggcctactgggccaccaaggagggcactgttcctgccgcagcacacggccttgaacttgttctttcctcttggctgtttactggctgcttgaactgagagaaggagcagctgcctcggaataagaactgtaccgaagccaacagctctgcagtatattctgacctgttcccaatcttaaagacagtgggaaagtttccagaaaagggaggtgaaaatattgaaatcgtccgtctgcacgtccactttcataagcccaaaagcatggtggtgtgtttcagagcagcttcctctacaaattctgcgtccacattgtcatgtccttcaaagccatacagtgctgggaatgggtgaggggagagagagagagagagagagagagagagagagagagagagagagagagagagagagagaggagagagagagaagagagagagaggaagtgttaatatggagtcatggctatttataacgttcccacagcttactgagaacatcattttatattttagtgaaatgtgttattctgagaatatgttggtaaatatcattaagctttggtttaaacacctcaaggccctttcagtgttcaaaggtaagtccccctttggtaattaggcagtacatactctctctaacgaaatcaactttaataaggacgtacttgtaggaggtacaaggaagaaaacaatacaaagtgtgaatagggaatgattagggtgtcaaggcaaacgcctggacacagaggtatgagttaccttggttggaggactccaggcccatcagaatttcgatgaagtagttcagaggcagaaattctaccggaaatgatgatttgtcaatcatggagttccgaggctaaaagggaaaacactccctacatatgaattgcttctccaagaaacgcccaactttaaataaaataataaaaaccataactgtctacctgggcttattgacatggcgggtgggctctgaagagtgctttctatctgggcttactcggactcacctctttcctgtagtttttcagcagccgggccacatggttccgtgaaatgatattggaactcatggggtggtcccaaagccggcagaccttctggccaataagctaagtgaggttgaaagacacacagaggagagtataggtcacagtgcatcgacagaccacatacctactcttaacttcaaactgtgattcccaagtggctagctattgtaaaatgcagaatatttgtgatttttgacccttggagagaggccatgttcatgaaatatgcttctgaagtgttcataaatactccctcaagtgctaccatgaagaaaacaacttttacatcaatgctgccaaattcctttctccctgagatccttcaaagctgaagatgagcataccaacccagataacactttgactggaaactaaagatggtatgtgtgtttgtgatttctcttctgtctggtccagaaactttaaataccccaacatacaggacaaaagaatagtcaaatttgtagaccaaactaaatgtcaactcttttcctaggggagacagcctgggaaaggtgggtgctttgtactcaggaagcctgtgactgaaccactataaggcaagaccaccaggtccagaagggacatccttttggggaggatggccagggccaaaggtcccggtgctcacagatgtaaacagtgtgcagggctggccaggctcttgggtcaggaagtttgcaaagtccgaggtttggaagaccttgctgtggaatttcacgttttcatgatgtttccaactccaagagctaatattcccacaaaagagcaaggagtggcttataaccttttctcttgtggtttttgttcttcttttgacctggaaatgttttcctatgctcagctatgcaataagaagaggaaatacagttctagaaccttctggcctcacttgtatctaaatcccttatcagtttaaatgccagaggcacacgtttcccttttccctccaactcagactctgatataaacaggagtgtgctttcctagggaatgagatgcataaactatcagcatacactgtgctagagctcagcgccagagaggacacggggtaggccctgtgagggacagccaacagaaggctggagatggatgggaagtgaactgacttcagccaaagggaggaaactcttctcacaggcgataaatgaagaagagtggaccagggcttaagaggaaatgaatttcaggattaccggagggagccggacaatgatgctgaatttcagttgttcatttttctctgaattgtccagatctacaaaaaaaaaaaaatttggagattaacagataagacagatatatccacttaaataccacagccagattcaatcctgagtgttcccttctgaggcattccaaccctgcatctgcaggctagcaatgctttgaaagctttagttggtgacatggactcaagggggctttttattttgtaacaggctgctggtcacaagcaattttatcccccaacttaaagcataaagacctctgaagaaggacggctgctatgttaggtaacgttgacagaaggtgcgcatgaatgacttacatgagagagattatggccttaacagtcatgttcacttgcacactgttatctgtcagttttacttgcatttccagtcgaactttgaaatgacaaaattaactggctgaaagtaagccaatcgtaatatttgcttgaaaaacaaattcacggacacagactctcagcctcttcttaccctcgaatacagaaatcaaatctaatatcagtgtctagactcagatgttcttcagggactcctgaagggctaaagtactttcaactggcctgaaggaatggttccaggacatgggctgtactaagaatttgtaaggctcggtacagggtaaaataaagtgatatatgttcaaatagtaagagcttcaatatgtactgcagggcattcgactgagcattggagctttctgaaggtagctgggcctgtgtgtcacatacccagaagccagccctgagggtggccaggctgagactcaccctctgcttaactcagatttgcttacctttcataagcctcgtgaccgcggtctcagtaagcagcagcactccgttatcaatgtagtgcagaaggctgtacaaagggaggcagtggaccccaaggatcgtgtgcagagagtggaaacctaggtgagtggaacagaagcagacatgacgagccgagccagcatctccagcttccagagaggatggattgatcctgtcagtaaagcaagcgctgagcttgcttagggcttgggtcagccaatccttttatgacaagaagttcctggttaatataatctctctgtccttgataactgatcttcaaattccacacgcccaagctaaaaggctgttgggatggagaccattttgctgaaagataaaaggaagctggggccagatgacaagttatatctctgtctctggtcctctcacaaagacttttgcagtctacttggactaaactatagaaaagaaatgtagatgatatgacccgatcagagccctgtaaaaattcagtagagatgattctctctctccctccctctctctcaagtctaatgagtagggctacaaacccagagctctatgcatactatcagtgacaaggaacaaaagaaagacatatggaaggagataccagaccagatgagaataagaaaacccattcttggagtgtcagcctcttgagcatctttggaaaggtctatacttagtgtgcagaaacatcagaggcagaagagtagatccaggccaggatcctgctgctgtttaactaagcagctctaaataactgcctttctgaacttccttccttaccgcctaaagtggaatgcggataccttccttctaggctattacaaggaatagagcagttatacagagcccagcatatggtacagtgtgactaacactgggcacgcactacgtgagcactggttcacctgctccatacccaagactatcagatgcaactactagattcccatagattcaggcagggaaactgagattcccaggagctgagaaaacttccctgtatcctataaatagtaagcaaaaggttagagtagcctgaccatagcctggggattgtagccttagttcaatatcttagagcaatatctagtagctgggttactgtaacaataactgggttaatatgaacagagacctaaggtgagagagcatgcatgggtatattcagaaacatgaagtgatcatttgagttgaaatctgatgactaacaggtaagtctgggcaacatttacttaacacattctcatacatgaagccggggtgggcagtaggacaatggacaaaatactgaccattaccactcctgttcaccttgccatgtagtagaggtgccaattgattcatcataaaaatgaacatatatttacatgtgaccagttctgtgctatatgtacatataacatggacccaatgctgaatgctactaaagaatttatccaggaaacctcaaggaagcactgaaagtttttgagcatcataaaagaacaaattttacttttggaatattacaatgccaacagacaaagaatggattagacccataagaactgtggtctggacaggtataagagggactgggggcaccaagtggggaagaagagagaaggacgtgttctagttagggtttcttatttatctgacaaaaacccacagctaaagcaatgtggggaggaaagtgtttattctcctaacagttccatgtcactgtttaacatcagaggaacagggacaggaacccaaacagggcaggaacctagagtcaggagctgatgcagaggctatggagggtgctgcttactggcttgatcctcatttgttgctcaacttgcttttttatagaacccaagaccaccagcccagggatggcaccacccaaaataggctggacccacacacacatgtatcactaactttaaaaaaatgccacattctaaggaggaatgaagtatcctcacttgttcttccttcttcttgagtttcatgtgttttgcaaattgtatcttgggtattctaagtttctaggctaatacccacttatcagtgagtgcatatcatgtgagttctttttgtgattgggttacctcactcaggatgatgtcctccagatccattcatttgcctaagaatttcataaattcattgtttttaatagctgagtagtactccattgtgtaaatgtaccacatattttctgtatccattcctctattgagggacatctgggttctttccagcttctggctattataaataaggctgctatgaacatagtagagcatgggtccttattaccggttggaacatcttctggatatatgcccaggagaggtattgcgggatcctccagtagtactatgtccaattttctgaggaaccaccagactgatttctagagtggttgtacaagctagcaatcccaccaacaatggaggagtgttcctgtttctccacatcctcgccagcatctgctgtcacctgaatttttgatcttagccattctgactggtgtgaggtggaatgtcagggttgttttgatttgcatttccctgatgattaaggatgttgaacattttttcaggtgcttctcagccattcggtattccttagttgagaattctttgtttagctctgtgccccagttttttcatgggtttatttgattttctggagtctatcttcttgagttctttgtatatattggatattagtcccatatctgatttaggattggtaaagatccttttccaatctgttggtggcctttttgtcttattgacggtgtcttttgccttacagaagctttgcaattttatgaggtcccatttgtcaattcttgatcttatagcacaagccattgctattctgttcaggaattttccccctgtgctcatatcttcaaggatttcctcactttctcctctataagtttcagtgtctctggttttatgtggaattccttgatccacttagacttgagatttgtacagggagataagaatggatcaattctcattcttctgcatgataaccgccaggtaagccagcaccatttgttgaaaatgctgtcctttttccattggatggtagagacaaagtttggagctgagatggaaggaaggaccatccagagactgccccacccatatggggatccaaccataatcagccaccaaacgcagacactattgcatatgtcagcaaaattttgctgacacaaccctgatatagctgtctcttgtgaggctatgccagtgcctggcaaatacagaagtggatgctcacagtcagctattggatggaacacagggcccccaatggaggagctagagaatgtacccaaggacctgaaggggtctgtaaccctatagaaggaacagcaatatgaactaaccagtacccccagagctcgtgtctctagctgcatatgtagcagaagatggcctagtcggccatcattgggaggagaggcccttggtcttgcaaagattatattccccagtacaggcgaacaccagggccaggaagcgggagtgggtgggttggggagcagagtgaggggagggtataggggactttcaggatagcatttgaaatgtaaatgaagaaaatatctaataaaaaattgtttaaaaaaataccctacatgcttgcccatgccctagtctaagggaagcaattttttagctgaggttccctcctctcagatgactccagcttatgtcaagttgacataaaaccagccaggacaggaaaagtctcatgataacatgtacatgctcaacaactgactggatgcaggaatgacagagaatcacagcctgtcctcaggatgtacacggtcaaacaaattatgctcagtgaactgtagtttgagttctgagaagtcacggcactttctctctgaatatatgagtcatgagcactgggtcactcataattcctggcaacaccaaggatcacatgacgtgcagatgttgtcctcaagttgatgtaaatggctaaaaacagattgagttcactgggttccccaattcaaaacaaattatagtattactacctaatcaacacagtttcacatggacttggaaattctttcccagactaataaagtcaaaacttattcctgaaaaagcatttatactagatcacgagtcgtattcccaggttcaaaattccttctccagtgtcgggtacctggtgacaccccaacaatccttcatgtgtgcgtcattggcacagtatcaagggcagtagcctatttacagcctcatctctgtgtgtcagctctgagcagagtgggtggctataactagccatcggtttcatcgcactaatcgtcgtcctcagagatatcgcccttgctgaagccagggagagagagatgacagcaaacaagcaagcaaacaaaaccaaacaaacataaaaacaatcatacaaacaaacaaacgactctgctcgccacttcctcactccctttttttacttacatgtctgacttatgaaactcaatttttgctagtcccatagatctgaaaagcaatctcccttataaatgcttagtatgaaccccttgtaaacacacacacacacacacacacacacacacacacacacaccagtggtgccactttgccctctcttctcttgtcacatgaacaattataagcatttgatagaaaaggaaaagcctggtatggtacggaaacaccctcgtgtaatgccagaacttggataatcagaagttcaaggccagtgttggctacgaaagtttgatgccatcctgag

SEQ ID NO: 943 - DNA, 3384 bp, Mus musculus
ggataccaaggacgcgactcttaggagagggtgaagttttgaagtgagaccccagggaccaaaacacacggagaaaaataagagtttaaacaaggatcaggaccaaaagaaaggaactgtgaaaaatggaatacaatagcaaagatgcagaagaagaaactgaagatgaagaggagggactgaaggaggcggagggggaggaacaggagaaggaggaggtaacagcaacctcagaaacagacgatgaccaagaagacctcccttctgtcttagtgcctacagttaacattcgggaggagcggctcatcaatttagctgaaacaccagctttcctctgtctgcatgagctgcactccaagggaaaacttcctggaaccagaatggcagagttgaaagccaagtacaccttgctacacgatacagtggtgagcacgcaggagtctgaggtgcagctactggagaacgccaagcgcttcacggagcagatccagcagcagcaggtctgtctgcagcaggccgaagacttccccaacgtcttcaccactgaggtctgcaaacttcgggagcagctgctcaagtaccaaaatgaatacacggcagcgcaagaaagggagtacaatattcagtacaggctgactagcttaacagaagaaaagagtatcatattaaaggaatttgagaagatacctaagccaggagaaatagagaagaagacgaggctcctgaaagaaagcactgaggaactgcgcaaggaggtgattcagaggagactggagatcaaaaacctgcgggaagatgtggtgctcaagcagaagcagctagtgagggagcagaaggagctggaggagctgatggagtatcaggttggcttgaaggatgacgtggtccaccatcaaagtgttcctgtacaaattacaaaggagatagaaaaaatgacacgcaaaaaagtagaaacagagaagaaaaatattgtcttggaatctgagttgaaagagctaagtgactctttaaagaagcttgaaaacaaagtcaacactcttgcggaagaaagggatgacataatgaaggaagttgagggcaagcgaaccttactagaagtcaaagaacgagagtatggccaactgcttaaactattggaactaaccaaagagaacgaagcctcctcgctagctgaaagagggatcttggatatcaatctacggaactgtctcatcgacaagcagaactaccatgatgaactttctcgtaagcaaagagagaaagaacgagattttcggaatctgaagaagacagagctgctcctgaaagtgtctttggatgcgctcactcaggcacaagccatgaatcaaaggcttctactagagatggaagctatcccaaaagaataccttacattgcctgaacgaaggaaagagctccacaaagaggttgatctagctaggagaaatctggctcaacagaaatctctgtcagaagctgaggccaagttagtggagcagcagattgcacaggagaacaaacttctaaaggagcaagaaagtttgcgggagctggtgttcaacctcgggcgaatgactcagatcaaaatagatgagaaagaacaaaaggctaaggatttcctgaaagcccagcgaagatatagtgagattgttaaggaaatcaaatcaaaggaccttgaaatcaggctatacaagaagagaaagcatgaaattcataggagactcagagaatttgccagcttgtatgatacaattagaaatgaaagaaacaaatttgtaaacctacttcacaaagctcatcagaaagtaaatgagataaaagaaagactcaaaatgtcattaaatgagctggaaatcttaaggaacagcgctgtctctcaagaacgaaagctacaaaacgccatgctaaagcattccaacaatgtgaccatcaaggagagcatacagaacgatgtgtgcaaaatcactgctaaactccaggaaatgaaggagaagaaggaggcccagctgaccagcatggacaggctggccagcatgatcaccgtgatcgaagaggagatggtgcagctgcgcaagaagtatgagaaggccgtacagcggcggaatgaaagtggtgttcagctgatcgagcgggaagaagaagtgtgcattttttacgaaaaagtgaatgtccaagagaagataaaacttcatcaggatgttgaaatccacattctggaagaaaaaatccgattcctaaaactgaggattgccgaaaagcaaaggcagatttctgtgacacggaaactagtgccaatcaagaagtccctggatgccgacctggctgtgatccagattcagttttcacagtgcacagacaggataaaagacctggagaaactctttgtgaaccctgacagcaagggcagggtccgcttcattaaagggaaagatctgactgaagaagaaatgatcaagaaattagatatgctggaacttcagatagccaagaaggaggagaagctcctggagaaggatttcatctatgagcaggtgtcccagctcacaaacaggctcaaaggcaaaactcaggcttgcaagaaggacacactgctcttagccaagaagatgaatagctaccaacaaaagatcaaagttgttacccaggaaatgatggctcttgttgctgagctgtccatgaaacaagccctgaccattgaactccaaaaggaggtgagagagaaagaagaattcatcttctcctgcagtgccaggatagaaaagggcctcccgctcaacagagagattgagaaggactggctgaaggtgcttcgagatgaagaaatgtatgcctttgcgactgctgagatgtctcgggagtacatggaaacggattatcggcagctgcccaatggtgtttatacaactgcagagcagcgtccaaacgcctacatgcctgaagcagataccgagcttcctctgcccaaaccgtatggcgcgatggctccatttaagccctctgaacccggagccaacaggaggcacattaggaaacctgttgtaaagcccattgaaatctaaacatgtgaaccaacccagcagtcctctcacagagagggcctgagccaagcctcagaccttctatggagaatgagcaccagggttctagggctgctgatgagccaggcacggtcaacaacaatgggttgtttccaaagcagtggcttccttgtacattcaccaactattacctggtaagtgacactgaatgggacatagactacagctgtgtcaaagggcattttgattgttcatgtgtttctttttcactgcttatagttactacacctcaggaatgtacagtagacaagatgctgtaaaagtacaaaataaataacttttcagt

SEQ ID NO: 944 - protein, 974 aa, Mus musculus
KMEYNSKDAEEETEDEEEGLKEAEGEEQEKEEVTATSETDDDQEDLPSVLVPTVNIREERLINLAETPAFLCLHELHSKGKLPGTRMAELKAKYTLLHDTVVSTQESEVQLLENAKRFTEQIQQQQVCLQQAEDFPNVFTTEVCKLREQLLKYQNEYTAAQEREYNIQYRLTSLTEEKSIILKEFEKIPKPGEIEKKTRLLKESTEELRKEVIQRRLEIKNLREDVVLKQKQLVREQKELEELMEYQVGLKDDVVHHQSVPVQITKEIEKMTRKKVETEKKNIVLESELKELSDSLKKLENKVNTLAEERDDIMKEVEGKRTLLEVKEREYGQLLKLLELTKENEASSLAERGILDINLRNCLIDKQNYHDELSRKQREKERDFRNLKKTELLLKVSLDALTQAQAMNQRLLLEMEAIPKEYLTLPERRKELHKEVDLARRNLAQQKSLSEAEAKLVEQQIAQENKLLKEQESLRELVFNLGRMTQIKIDEKEQKAKDFLKAQRRYSEIVKEIKSKDLEIRLYKKRKHEIHRRLREFASLYDTIRNERNKFVNLLHKAHQKVNEIKERLKMSLNELEILRNSAVSQERKLQNAMLKHSNNVTIKESIQNDVCKITAKLQEMKEKKEAQLTSMDRLASMITVIEEEMVQLRKKYEKAVQRRNESGVQLIEREEEVCIFYEKVNVQEKIKLHQDVEIHIEKIRFLKLRIAEKQRQISVTRKLVPIKKSLDADLAVIQIQFSQCTDRIKDLEKLFVNPDSKGRVRFIKGKDLTEEEMIKKLDMLELQIAKKEEKLLEKDFIYEQVSQLTNRLKGKTQACKKDTLLLAKKMNSYQQKIKVVTQEMMALVAELSMKQALTIELQKEVREKEEFIFSCSARIEKGLPLNREIEKDWLKVLRDEEMYAFATAEMSREYMDYRQLPNGVYTTAEQRPNAYMPEADTELPLPKPYGAMAPFKPSEPGANRRHIRKPVVKPIEI

SEQ ID NO: 945 - DNA, 78082 bp, Homo sapiens
  misc_feature (1)...(78082): n = A,T,C or G
tttttatgtttaaggcagctaaaatctattctccacagtttagtttttttaagagagatttgtttttttagaggagactgaaataacaaagtttatcaactaacattctgaacatctatgactttaccttttccaatttatgtagaaactgcaagaacatattcaggtgttttaccctgtcagctttctttgcaggtttgtaaggcaccaaaggccagcagaatgatagagacagaaaacaggaaaggaaacctctgtagttttcctgcttttctgtggccataaaactagccaacatgtatccttggcccacctacaattaggcttcaaaccattgctgtttttttgtttgttttctgagacggagtcttgctctgtcgcctaggctggagtgcagtggtgcaatctcggctcactgcaagctccacttcctgggttcatgccattctcctgcctcagcctcccgagtagctgggactacaggtgcctgccaccacgcccggctaattttttgtatttttaatagagacggggtttcaccgtgttagccagcatggtctcgatctcctgacctcgtgatccgcctgcctcagcctcccaaagtgctggcattacaggcgtgagccacggcgcctggccaccattgctgttaaagatgggactcaacttaggggaaatacagttgagcattcagtaagtcagagctagaatctgcctatatctgccactaggacctgatcacagtactctctaaattctaattctctctaaattctgctctaattccctcttgtttacagtgatagtctgcaagcacatttttaatagccttttgttattaaaagtaatacatattggaaaaattagaaaacacaggcaagcaaaaataaaaacataaaagcagcacattcttactacccagagcacatcattttaacatcttagttcttatccttctggatctctatatattcacatactcatatgtaaaataagatcatcttctacggacagttcttgctttctggcttaacaagatgtctcagcttcactttgtgtcttccctgtaccagacctgaaatcaaccatttctaacacttgctgcttccttttagtgggaaataagattaaagaccaaaatgtattaggagtgctcattgttgttaatgtggcattatttctagaccattatatattttttaacctttaagtttagtgatacaagtgcaggtttgttacgtaggtaaacttgtatcatggaggtttgttgtacagattatttcatcacccaggtattaagcctagtacctattagtagtttttcctgatcctctcccttctcctcccttccaccctctgacaggccccagtgtgtgttgtttccctctatgtgtccatgtgttttcatcatttagctcccacttataagtgagaacatgtggtatttggttctctgcccctgtgttagtttgctaaggataatggcctccagctccatccatgaccctgcaaaggacatgatctcattcttttttatggctgcatagtgttccatggtgtatgtgtaccccattttcttcatccagtctatcactgatggacatttaggttgattccatgtctttgctattgtgaatagtgctgcaatgaacatacacatggatgtgtctttataatagaataatttatattcctttgggtatatacccattaatgggattgctggatcaaatggtatttctgtctttagatctttgaggaatcaccactgtcttctacaatggctgaaatacttacactcccaccaacagtgtataagcattcctttttctccacaacctcagcaacatctgttattttttgactttttaaaaattgttatctttagttctggggtacatatgcaggatgtgcaggtttattacataggtaaatgtgtgccatggtggtttgctgcacctgtcaatcagcccatcacctaggtattaagcccagcatgcattagctatttttcctaatgctctccctcccccaactaacagtagccattctgactggtgtgagatggtgtctcattgtggttttgatttgcatttctctaatggtcagtgatgttgagctttttttcataaaattgttggcattggccacatgtatgtcttcttttgaaaagtgttcatttcctttgctcactttttagtagggttatttggctttttcttgtaaatttacattccttatagatgctggatattagacctttgtcggatgcatagtttgcaaaaatttttcccatcctgtaggtcatttaatctgttgatagtttcttttgctgtgcagaaactctttagtttaattagatcccgtttgccaatttttgtttttgttgcagttgcttttggtgtcctcatcagtaaatctttgcctgtgtctatgtcctgaatggtattgcctaggctgtcttccagggttattataattttaggttttacatttaagtctttaatccatcttgagttaatttttatgtacggtgtaaggaaagggtccagtttcaatcttctgcatatggctatccggttactccagcaccatttactgaatagggagtcttttccccattgcttgtttttgtcaggtttgtcaaagatcagatagttgtaggtgtgcggtctaggctatttaatggacaaagctagggaaaaaaattttaagcatgagttagttcatacttgtatttgcaattcaattttaactttgtagtgttttcactaatttgattttacaattgtatctcttttacacagaaaattgatttctaatgtaattgacattaaagttttcttgagtttaccataaaaatcactcttttaaagtgtttttaatggcttttagtatatatacagagttgtataatcatggcataattgtagaatatttccgtgacaccaaagaaaccttgtgcccattaaaagtcattcccctcacactagttgtcttatgtgtaggaaaccactaaatcaactttctgtctccaaagatctgcccactctggatatttcatataaatgaataacataatatgtggcctttggtgtcttgcctctttcacttagtgtatagatttcaaagttcatccatgttacagcaggtatcaagactccattcctttttatggctgaatattccatcctatggatatatattttttgtttgtccatttgtcaattgatggacttgtaggttgtttctctttttttttactattatgaatgatgctgccatatttgtgtccaagcttttatatgagcatatatcttcaatttaattgagtacactctttgctttttcacgtggatttgagttattgttccttctttccagcatgaagagcttactttattatttcttataaggcaggtgtgccagcaatgattttctctattttggtttatattggaatgtctttatttcctcttcctatttgaaagatatttttgatggatataggattcttggttgacaggtatgtgtgtgtgtgtgtgtgtgtgtgtgtctgttttttcttcactttaaatgtgtcagccactgccttctcccttccattattttagatgagaagttactcttatgtgattcccttgtacataataagctgtggttttttgttttgctttttgctgctttggagatttatctttatctttggctttcagcagtttgtgatgtatctgaatgtgaatatctttttgttgattctacttgggattctttgagctcctgaatatgttttcatcccatttgcaaagttttttatttctttaagtttgttttctgttctctttttctctagttctcccattacttgtaatttagtgggattaatgtcctccatttctgtgacaatctgtttgtgtgtcttcatgctttttctctctgttattcaaattatatacagtagtcccccccaccatctgcaattttatgttctgcgatttcaggtatctgtggtcaactatggtccaaaaatattaagtggaaaattccagaagtaaacaatccataagtttaaattgcatgctattctgagtagtgtgataaaatctctcatgttcccacaccatcccacctgaaatgtgaatcatccctttgtccagcatgtacacactgtgtatgctacccacccattaatcacttagtggctgtcttagttaccaggtccactgttgcaggattgctgtgcttgtcttcaagttacccttattttacttaataatggccccaaagcacaagatcagtgatagtggcaatttggatacgccaaagagaagccataaagtgctttctttaagtgaaaaagtgaaagttctcaatttaataaggaaagaaaaaaaagtttgctgagattgctaagatctacagtaagaacaaatcttatctgtgaattgtgaagaagggaaaataaatttgtgcctagcataaatgggtttggtactatccattcagggatcctcctggggtcttggagcacatcccccatgaataagtgggcactactgccttctctactgatctacaagtttaccgattgattcttctgcttgctcaaatctactgttgaactcctccagtgaatttttcaattatgattttctacttaggaatttcagtgtagctccttaaaaatttcttcttactgacaatctctatttgatgcattgtcatcatactctcctttaatttttaaaacatggtttctttcattcttcaaacatatttataatattttctttgaagtctttgttaaatctaacgtctgcatcctccctaagaaagtttctgcctgttgttgttgttttttttttttttcctctgcagaaaggaactggggatctcactatatgggatgggggtcatattttcttgtttccttgcaagtctcataatttttcattgtaaattggacattttaggtcatatattgtaacaactctggattctgatccttcccaggcttattgatgctgttttgttcttgttattgttgttcatctatttatttgtttagtgacttggctggactaatactgtgaagtatatttttcccccgcagtaggcagcctctaatgtctctgcttagatagttgttccttgtttttttgtttttaaacttgaattcctgggtgttgccctcggtcagtcactgattggtcagaggtcacgcttaagctcactgagccagtaaggttttcatccttttccactgggtctgtgtgtggcttgggaacaacttttggagttcgaggagtttatatatctgccacttttaactcagggactgacttggaagtaccctgtctggttgatcttgggtggtcacagccgtgggcttttccacagtctcctggaccaccagtatcaagtgtgaatttttttactgtccctcgtcccaatttctctgttaaacttctgctggtctgcatctattagcatcacaaaactattagcctactctgttagcccttatgatatctgtttttctatgtctgttattttttacattgctctgggacatgaatatcctacactctgttccaaataaagtcaaaggcagggctgcagagctgcaagtcctcacagcttgctcagcccccaacctggttagagcctctgtgttactgagcaggagctggggatatggggaactctgatctgttttgtttgccctgcccagggtctccctgtagagcaggacattagggagtgagtactggcactaccgaacagctacagctgcccatggggaagaaggggaggatgagtgctgagtgctaccgtttcttagatcttcacctgggatagatcttgatcctcagcaataggaaagtgggggacatgggcacctcactggctgcaagcctgcccagaatagttctgaaacctgaagctagagggatggatgcagcccatggttcaaatgccacagtttcttgctgagcttcagtagattttattgaataagtgtttctcaatttattatataaccttaggtcaatttccagagactttaaatggttgtctcagattattttgaccagttaaatcaatgcttcttttgtttcttttgtttgtttttttttttttttagacagaatctcactctgtcacccaggctggagtgcagtggcgtgatctcagctcactgcaacctctgcctctggggttcaagcgattctcctgcctcagcctcccaagtagctgggactacaggcatgcgccaccatgcccagctaattttttttgtatttttagtagagatggggtttcatcatgttggccaggctggtctcaaactcccgacctcaggtgatctgcccgcctcagcctcctaaagtgctgggattacagacgtgagccacagtgcccggccaaatcaatgtttctttgaaggagagaattcatcaaactcttcatcccaccattttggaagtcccacccaccccctggattggtctgtaatttataattttacttatttgctttaaatcagcagcccccaacctttttgacaccagggaccagtttcgtggaagacaatttttccgtggggcagaaggaatgcttttgggatgaaactgttccaccgtagatcatcaggcattacattctcctaaggagtgcacaacctagatccctcacatgcgcatttcacaatggggtttatgctcctatgagaatctaatgccactgctgatctgtcaggaggcagagctcaggtggtaatgctcacttgcccgctgctcatctcctgctgtgcagcccagttcctaaagcccaggggctgggaactcctgctttaacttgcaatattaaaacattgcaaaatgccaaatacaatcatttacttaaaataaaactgcagaatgtagtttcagtattctatcatttttttttttgtatctatctcttcaaactttggcctaccttaaggcagagcctatgttatattcatttctgttttttttatgcagggagcattaagtaggaagtaatggtctttttagcttaagaacaaaactaaatactatctgtttttttgaatatttgagtccacaattaccttacccagtagtttaccttcagaaaatggctggttagctagttactgggctagcccctagttggtcttcattgtacccatatacatacaaacacacactcacatatttaccttttcataatcttttcccagcaacttttctcctttaagtgtgtccatttgtaaaggcttttttttttttttaacttattagattttaaagccatagtaactatggtctgtatactttgggaaaccaatgaaaatgtttgaaacatgaaataaattatatattggctaaaaaatactgcagaaccaaaataaatatctgtaaaatgtaacattaagtcgacttaccaacagcaactcaacagttaaaaagttacaaatagaccgggcgcagtggctcacgcctgtaatcctaacactttgggaggccaaggcgggtgggttgcctgagctcaggagttcaagaccagcctgggcaacatggtgaaaccccatctctactaaaatacaaaaaattagccaggtgtggtggcatgcgcctgtagtcccacctaattgggaggctgaggcaggagaattgctagaacccgggaggtagaggttgcagtgagccaagatagcgccactgtactccagcctgggcaacagagcgacaatccatctctggggaaaaaaaaagttataaataaattatatttaaggtggcatatgaatagattttaagatatttgatacaggtagagtatcctcaaaggtcttaaagatcttgttcaccatatttcacccatagattaaaaaaataatgagggttgtagggattggaagccaggcctggcaccagatagtatggccctcatgaaagatccccaacactttcacaaagaagaaatggtttcataatgcatttaacatttttctaccctgatgcgggtagaaagaccacgaaaccccactgtatagactcagacttttgcattttgatagctgcattcattcatttgctaacaaatataagcaatttacctagcacctgggtatactgtgcctgggattatactgtgcctgggattctagtaatactttggctgaggatacagtgaaggacaaggtaatctgggccctttcctcataggtcttatatactagctggggaagtataaaaatgtttttaataatgtaagtaaatttattcttgcagattgtaatgttatgaagctcagcgttctttagaggtaggagcaagtacacgtggttatcttctttagatttggaagtcagaaaaggccttcttatgaattcatatttaagctgagacatgaagaaagacttggagtgaagtagggggagtaaggaatgactaatcagaggccctggagaaaaagagagactcatacatctgtggaaatcaaaggcagccagtgtggcagaagcaatgaagcactgggagcttaaagagtgtgttgtgaaaggaggctgtgggggtgttggggtcaggcaggacctcaaggtcttgaataccaagggtcttgaattttattccacttgaagtgttttgatcacccagcataacataaccttgtctgatttttaaaaagatctccctggcagaagggcagttaggaggtttagtagtggtccaactgagagatgatgagacttgggccagtgggatcagggaaggaagaggaaagtggatgaattcaataagcactttagaggtaagggccaggctttcacgcctgtaatttcagcactttgcgaggccaaggtgggtggatcacctgaggtcaggagttcaagaccagcctggctaacatggtgaacccccatccctactaaaaatacaaaaaattagctgggcgtggtggtgtgcccctgtggtcccagctacttgggaggctgaggtacgagaatcacttaaacccgggaggcagaggttgcagtgagccgagattgcaccactgcattccagcctggacgacagagtgagactccgtcataaataaataaataaataaataaataaataaataaataaatgtaagaacaacagggctgaaaaacacaaatattctctttagttctattttgatactgtcactagcagttgaagtcaaacctaatacaaatgctcattgcattatgattttaggatggtaaaactttagtgtttgacgatgttttatgatgtctgttaactaattatcacctaactcagaaaacagatcaaaagtcattttaactagaaataaaatgggaataaatagtacctctttatgcattggaaaactttccatgcttctttgacagcagaggcaaaggcatcacggtacaggggagtgatcgtgggtttttggagctgaaccacttgggtttaaattctcaccctgcctttaactagctctataaccttgaacaaatcatttttctaaactttagtttcaaatggagatgataatctttatttcacaacatttttaagaatgaaataactgatgggcaacacatactctaatagctgttcaataaccattcattttctcaacttacaaatagccaacctataatctacactattcagattgtttgttaaaccttgaaattttttttagagttagaagaatttaactcaatcctctcaatttccagacaaagaaataacagcctagggagttgaaaagacttgcctgaggacacagaatgtactgggggcagaatagaactagcactattttctccaaacacctggcatgtttccagtacactacattgcctcgtgtatcctctaatgtttaatggaggattttataagataaccatatatccattccatcccctgcttaagcctaaagagaatggtgattaacagtgaccttatgttctctttgctagttacatgctatgggaaaacttcctggaaccagaatggcagcgttaaaagccaagtataccttgctgcatgacgccgtgatgaggtatgcaatttaccaatatggagacatgattaatcacctttaaatttcttactggtgatgagacctgtcttcatttgcattcccccataagcagaccctgaggcaaggatttgcgttcagggagtttgagaagtggtacgagaaagcatcgtgagagagtggggaagtgcgactgggaaggaaggaatctagccttgatcaggccgtgtacatctgcgagtttatatgatgggctactggggctcagcctcacagaggagcctctgagtggctcacctcagcactctcccactgaagagtgaggaaactggaatatttgcccaccagtttccaccactcatttattacaaattacttccagggagattagctcttggcacttccagcttgcgctttgacaaaccaagcaaactttgatggccagagacagctctcaggcggagggacacaggtgctgctgatacatatggtaactgtccactaaagctgcaggtgggcaaaaggattctggtgggacactgacagtctctgcataggacacacctgcaggactcttctcccgtgtctgttcatcactcagaggtgtagattctccaacaaccccagcttgagtctgctgagaccctgtctgtacttctcacctcctccccatatcacaagctacttacaccttgcaagtcccaatcaccaacaggtcagaagaacaggctatcatagaagagtccagcaagcctgcctgagcactggctattagccactgggaattaagagggcaggggagtgaagaaagagggaaaaccctaatgtgctgtgattctttaccactcccaagcctctttctttccttcccccacctcttgtctcagggccttgcattgtatcttcatcaaaagccaaggagcaacagcaacagatagaaactccatgctgccactccccagccatcctctccccgcaattcccaatcacttcccctccttcttatcttgcccagagatatttggctactttgagggtaaaagcatgagggaagagtgaacaacttggaaaagagcagagctgcattcctatgcaaacttcaagtgcacccaggttcctcacacccctccaaagcccccagccttggttcctcatcctcaagcccaagccaagtcctcacccccacacctaatggaggttccattcccccgtagctggtcacgcctgccagtgtgttctcagagttctcaaggctcaggaattttgagactttaagtggaaagtctggagtaatcttttacaacatacttcacactgcttaactgagaggaaatgccatgcagttctctgggcatccctccaatcctctttgcagatacaaggaatatcagtgtttcctgccctctggatagctcttctttttttttagacagagtctccctctgtcacccaggctggagtgcagtggcctggtcttggctcactgcaagctccgcctcccaggttcacgccattctcctgcctcagactcttgagtagctaggactacaggagcccgccaccacacccagctaatttttttgtatttttagtagagatggggtttcactgggttagccaggatggtctcaatctcctgaccttgtgatcctcatgcctcggcctcccaaagtgctgggattacaggcgtgagccaccgtgcccagcctggatagctcttatctagagcccagtggagatttgcagggtgctttgacttaacttcctcctcccctggcccacaactcagttccctggcccctaatgacaagtagcaatgcaggacctcagctatggcactatttcttcctcttccaggttgtgttgcaaaacagttaacttcccttctgctacccacattttacatcttgaccacttagttccctctaatgccattgcaaatactcaccattctctcctactcccaatgcctgatgggtgggaaaaacatgaagtagactcttcattcgtgctgctaggactacagctgggcagatatagcctggaaatattgaactgaaactgaatgagtcttccatagaaaccatgttataagagttgttaaagtctcttctactggtatcatgttttaaatacatgtgggtaagttgcgatttgtgttctggctggaaccctaccaccctgtcctttctatgcaaaaacaggcactgtagcctggtccaacagcttacaatttcaatagctgaagcctgacctattaaggagaccagatgactttagatttacaaagtttattagcatacatgaaaattgaattataggagaataattccagctttcattaatgaaaattatttgaggtatcactgtagctattgttgttgctatttggtacctaacatcatgcctggaacgtgttatgtcccagtaaatgttttgctagatgctattgagcaaatgacattataaaacctgggaaaatggatgtatctgtactgaattgagaatatcacaaaggtgaggcagacacaaggtaacttcagttgagattggcttgatcaagtcattgggcgtctctgcaaatgagctggaacttgaagatttatcttggtgaggacagttggtggggagcatacatcaaaagagagctctggctctaaaacaggaagtggtgagggcttacttcaaataggagaggtagctaatataagggtttctgggaaataggaatcatatctactggtaaggttggagccgatgcttgctgatgctagcttgcagcatagaggagttctataagatactggagattccgccatgtcctttttctacatcctctgacagatgtttagtccttttccctacatagggccaaggtcatagaatataactggggttgtaggaatctccctctaccgtgaccttcaagtccatccagctctaaccagtgtccaatttagaatcagaaatctgtaaattnnnnnnnnnnnnnnnnnnnnaatcagaaatctgtaaatttatttatattcataattgcgtatgggaatttctcttcctagtttcctaataaagtgccattagaaaagtttctgttttttcatagttcactaagtggggagagattttcctacaattatgttacaagaattcaagagagctagggttgtttggggagttcaagggaaaacctcctctttccgtatcatttatccccttctagtaagtcataatcattcttcaaagtcaagttcaaatgtcacattcccattgagtgatcctttctctgttgtctcctgctgtcttgatctggacaccagcggtagtacttgtcatctggtattcctctgcatctgccagattgtaagattcttgaagctaggagctaagccttattcacctcttgcacctagcatagtacagtcatctcttggtatccttgggggattgattccaggacctcctgcagataccaaaatccatggatactccagtccctgatataaaatggtatagtatttgcatgtaacttaatcacatcctcctgtatactttaaatcatttctagattacttgtgatacctaatacaatataaatgctatgtaaatggttgttatgctgtattgtttaggcaatcatgacaagaaaagtctgtacatgttcagtaaataaacaatttttaagtaaacattttattttggaataattttagattcatagaaaagttgcaaaaataatatacgaagttcccgtctatccttcacccattttcctctaatgggagcatcttacataaccatggtccatcaaaactaggaagttaacattcgtatattactattaattaaacttcagattttcaacagtttttccactaatgctcttttttttgttccaggacccaatgcagtataccccactatatttagccctcatctctccttgatctctgtgacaatttctcagtctttccttgttttttttaaatcacgttgacattttttgtttttttttttttgtttgtttgtttgtttttttgggtttttttttttttgagatggagtctcactctgtcgcccaggcgggagtgcagtggctcaatctcggctgagatggagtctcactctgtcgcccaggcgggagtgcagtggctcaatctcggctcactgcaagctccgcctcctgggttcacgccattctcctgcctcagcctcccgagtagctgggactacaggcgcccgccaccatgcccagctaattcaattttttaacaaaaattttccctcgtggttggttgaatccacagatgtggactcacggacatgaagggtcaactgacttggcacaaaaatgtcccagagttgagttgatctgaggagtggggagcagctatcctcactagacccccacaggagccaccgaggatgtacatgtctcattatgtgagtctctgtttttcatgtaacccagcacacaagagtcagaggtccaactgctacagaatgccaaacgtttcactgagcaaatacaacagcagcagtttcacctgcagcaagctgataattttccagaagcattctccacggaggtctccaaaatgagagaacaacttctcaagtatcaaaatgaatataatgcagtgaaggaaagagagttccataatcagtacagattaaataggtaagtgcacagttctctccggcacactgaaaagtcttttcctcataaatagaaaaaaatcagattaagttggaggtaattgaaggagtaggagatagcagtacgatgatgattgcaaacctagttctcttgattccttagaatggaatgggaattccctgaacaagaaagttacacttctcgaataaaagctcaggtgacagagatgcctgctgtgtttttcatgtcaggaaagccatctcattgagagctgcagtcagagaacacactccaccaaaccagttattagcattcccttgcccttcccctgccctggcagtggccccctcatcccgtgactatagcagtaccagagcacgcatctgcatggtgagcacttctccccacatgcattttccaaacaagcctccatgagctgagggtcacatgtcatctggctcactctattcttctaagagagcagcaacaggaccacatatgcaaacttcatctcctactactagattgttcctcaggatcaaggagaaaaggtatatccttttggaagacacatttacttatccaaatttagaggacgtcatttagtgaactaaagcagacattaagtgctaaaaggggaaatgttatcttcaaaatctcttctaacattccccccatggagtagcaagtcactggaggagtttgttcagcaagtcatactatttagattgaatttgaaaatgattgcaattcaagttttctgctgtggtgtgctgtgtgctgtgcctgggtacaggagagaaagcaaaaccgtttctcctagagtttgttaccatttaaggtggcagaactttctctggctatttttaagagtaggtggacttctgacagtgcaaatataattcagtccttcctagagataagcaagtgacttgagcaacctctcaaagaccttgtaagccctgggtttaaaatcctctctttggggcctattttttcactggcggtgggtgggggtggggtgtgaataaagaaggtcagtttaatcaagagatcctattcaggggggaaaattggaggtttttttgtctttcaatctaaacttgtttcaggcttaccagtgagatctatataaaaagaaagcccagttatttctgtgctctgtaagtgctctttcagttgagaaaataatgaaattaaaacaattggtggttgttcattagcattgaaaatatgaatgcttgacatttccatgaaagagtaagaagaacataagtcagttgatatttaaattgtttaaaatttccaactattcctgccaagagaaaaaaacaaaaacaaaaaccagaacggttgccctttaggtatagacaggcacattattcactgagatgggaaggagacaatgcatactgacctgcggtgaataagaacattcaaaatgcacatttgcagaaatgtttagtgtgtattctttttgaatttataatgtatcattcttaagcttgagaagattcccttgcattctcaaatattaacagctcaagaacaagcttattttcataaaagtaatggtgatgccaaaagaaataccagtaaagaatgaagggctatgcatttcattggcttaacatatttagtatcacagtcatgcaccacataatggtgtttcagtcaacaatggactgtctatatggtggtggtcccgtaacattataatgaagctgaaaatttacttttgcctagtatttactattcgatacattttatttttattttggagtgtactctttctacttatgaaaaaaatattaactgtaaaacagcctcaggcaggtccttcaggaggtattccagaaaaaggcattgttataggagataacagctcctaaatacctgccagtgggacaagatgtggaggcagaaaataatgactttgatgctgaccctgtgtaggcctaggctaatgtgtgtgtttatgtctgtttttgttattgttattgttgttgtttgttttgagacagagtcgtgctctgtcgcccaggctggagtgcagtagtgcaattttggctcactgcaacctccacttgctgggttcaagcaattctctgcctcagcctcccgagtagctgggattacagatgcccaccaccatgcccagctaatttttgtatttttagtagagacgggatttcaccatcttggccagggtggtcttgaactcctgtatgtctttgtttttaacaaaaatgtaaaagtaaaaagaaatttaattaaaaaccttacataataagaatacaaaggaagaaaatatttttacacagctctacaatgtgtttgtattttaagctgtgttatgagtcaaaagctgaaaaaagtaaattttgtaaagtaaaaaagttacagtaaatttattatcaaagaaaaatattttttataaatgtagcctaagtgtacagtgtttataaggtctacagtagtgtaagtaatgtcctaggtcttcacattcactcaccactcactcactcacccactgactcaccctgagcaacttccagtcctgcaacctccgttcatggtaagtgccctagacaggtgtaccattttttatcttttatgccatatttttactgtgtgtattctttgtttagatacacaaacacttattgtgttacaattgcctacagtactcagtccggtaacctgctatgcaggtctatagcctaggtgcagtaggctttaccacatagcctagatgtgtagtaggctacaccacataggtttgtgtaagtgcactccgtgatgttcacacaatgatgaagttgcctaacgacgcgtctctcagaatatattcccattgttaagcagcacatgactgcacatgacacagaaaccaattccctccacaccctcccactgacctccttccccctggaaaaagtagatatttccatccccacataaaaataaagagatgaagctaatgagagaaaactattcatccacatatacagatgatatttgtcagaccagcacaacaaactcttattgaatttctagataatagaagcccaaataactagcactcctccaccccaatatcttcaggaacttctgaatcattggcaactactaagaacaacttatttttcaaatactctagagaaaggattttactgtgtaattttgtcaatttttttgtgtatgttcacataacataaatcttttaatgttaataaatctaattatctggttggttggttggttagtaattaaatctatgttgcagtagtttctgtttctggattaatatttatgacttgataagtatgcagttcaggaaataatatgtaatctatttaaagttaaattaatacattgtaaatccataataaagtaattaaatacagttgagcttactttttgaaacaaaacaggagtacttacctctctaaacagtttgaaaagatttttcagtactctcttcaacctttgccttgccttgattgtgttaccttttggggcttccctgttttctagtaattcctaaaattttacagcaaatacgttgcgtctttcatgcaaaatctgacacattctgaccagtcttggtcagttgggggaaacaaggctgtggtgagctggcactgtctgttgcactgtgaacccggagagtgggaacactcaggccgcacacgtgcagggctgtcctgacgtgaccctgaccttggtgactgtctactctcccgtggctggttcctgtggtccttgttgcacattcagggtttattagttgttttccattcttggtccagtgctgatagcaaagttggaaccaagaaacaacagatctggtaacaaaggaaaggaggaatgatcttagcaacacatctggaattccagaaaattagaatgtgacagaagaggcatgtaggtactcaggagtagtcacaaggaaaaactcatagctagaacagattttaccttaacttaaaaaaaaaaaaagtttgctcttctgtggcaacaaatatcttaaaagaactaacttagttagaacaggtttctctgaatgtgtttctcattactcaaaaagaagcacctgagacacttgtttgaaaggaagatcccatccaaaaagtaatgattatgatttttgccccagcccaccgcccccacccaaagtgacatttgcttatgtgactctgactcacattatagttagaggaccgtgggttccaaaggtggttctcagccctgactggtcagtcaccagagtctcctctcagtgatcattcagtctatgcataaacacttccagtgacaggaagctctcagcctcccacagaggctcacgccaactttggaaatgctcctacacttaaatggttgttggatttgtttataaacctaccttcttgcaactttcacccacccatgctgtttctacttctgtggtgaatgatgcctctcacacatgtcagcatatcgggcttcctgcattatctcttcacccatagatccttaaaaccaaaagccttttgacgttgctttagaaaggaagtaaatcctaaggagctttgatgttgaagcaccccttagtcaggaaagctgaaaaatgtcagatttaagttttactgcaagtttgaaaggttaggagttaatacataccaggaggcatagaaacagaaacatgtttttgccccagtaatcccatgcaaaagtgataacccaaaaggagagaaaaagatataatgcataaagatattgatatttatgaaagtgaaaaattggaagcaatctgaattctcaaaaaatgtggaatatttaaataatgcattccagaaataccttgttactgaacctctgtagtcagagcggtatttgtgtgtcagtttagctttgactgtgtgactttggaaaagttgcttaactcctcagtttcttcatttgtacaacaaaaatcacaattcctacttagcaaggttgtgaattttagatatgataaatttaaagcacctggcacacagtatgttcagtatatgataaataatacttaagattattttattatggtatatctacccagtagaaaaccttgaaaatagctattattataaagtctgtttagcaacttaggaaaatattttaattaaatgttaggtaaaaatggattcaaccacacatatacatttaaaataagtttattaaaagataacagggaaaataaaaatgatcaaccatgtgtgatggagtaggattataatctttaaaaatagaaaaatacattccttttagaggaaataagtcagtatttcttaataaaaaaagaaaaatgtatcatagaaatgtaagttttaaatgtcctaaagaattagtcattttatgtttgtttaaacataaaaatatacttaaaggaaagaccataagtcacatcttgtgaaagagcttgctgtcaccattttgaaactcaaatactcaggttgcctttacaaccgaaagatagtagcacactactaccccctggtggcagcatgcccaaggtgtaggatcaatacctgggaagtaaaataccactaatgtatatgcaagctctaaaagcaaaggcataactatttaaagatctaaactcagcttcaatttgtggtctagacaactaatctatattaaattcaatgtgacacatgtattacaaaattcatctacattattgcaaataaaatgtcaaaaataacataatcccattaaaaagtaggcaaaggacataaataggcatttttcaaaagaagacaaatggctaagaatcaaatgaaaaaagttcatcactaatcagagaaatgcaaattaaaaccacaatgatatatcattttataccagtcagaatagctattattaaaaagataaaaaataagatgttggcggagtgctgagtaaagggaacacttatacattgttgctaggaatgtgattggtacaagctctatggaaaacagcatggatatttctcaaagaactaaaaatagaactactaatccatctggcaatcctactattggctatatacccaagaaaaagaaatcatatccaaaagatacctgcgctcatatgtttattgcaacactattcacaatagcaaagataaggcatcaacctaagtgtctgtcaagagattggataaagaaaatgtgacatatatatacaatggaatactattcagtcataaaatgaaatcatgtattttgcagtaatatggatggaactgaaggccattatcttaagtgaaaaaaactcacaaacagaaagccaaataccacatgttctcataagtgggagctaagtaatgtgtacacgtggacgtagagtgtggactagtagatactggagacttagaagggtgggaggacagaaggagggcgaaggatgagaaatgacttaatgggtatacatgtatataatttgagtgatggttgtaccaaaagccctgacgtcaccacactgcaatatatccatgtaacaaaactgcacttgtatcccttaaatgtatacaaatgagaaaacctggtgtgcatgtgcttttagctcatgttcctagatctatggactagtgggatctggttatttgttataaccagtggacataattgtctgtgtattcatttatttcatatgattttccaagtgtgatcaatacaaactttaaaatctttccatatcgggaaatcatatgacttctttggcacttaatagttagtcattaaataaagaatagcaagaaaaatgaaaaatatttctctagatttcttcaggaaatctggtcaataaaacagttcaaaatacggttattggaagaaacacgcaattatatcgaactcattttgtttagaacattcaagctatttgaagcaatttccaaaatgtcattctagcatcgtgtcctctcatcttattagttaaaataaaaatataaactttttttgtattttctcatgaataagtgaacaaaaccatatgttcccattcactgtctgtactttctaatgtttttatttcttttgtttgttaatctcaatttacaatgatgactggcttttagaaaaactgacatttctttctatagatgccaagtatatccaattgattgatgggattattgagtttgactatgtccttaactgatcttctgacttctggatctgtgcacttttgatagagggatgttgaagtctccagctgtgagagtggattcatctacttctccttgcacttctatcagttttgcctcatgtattttgatgttctgttgttaggtgcaaatatattaagaatccactggccgggcgctgtggctctcacctgtaatcccagcactttgaaaggctgaggcagtcagatcacgaagtcgagatcaagaccatcctggccaacatggtgaaaccctgtctctactaaaaatacaaaaattagctgggcgtggtggtgcacacctgtagtcccagctactcgggaggctgaggcaggagattctcttgaacccaggaggcggaggttgcagtgagccgagatcgcaccactgcactccagcctggcgacagattgagactctgtctcaaaaaaaaaaaaaaaaaaagaattcattaggtcttctcagaggattgactcttttatcattatataatgcccctctttgtctctgataactttttcttgctctgaagttcgttctgaaattaatttagtgactcatctttttttaatgttagcatggcatatctttctctatccatttacttttaatatatatgtgtctttatatttaaactggattattggcaaacacagcatataatttgagtcttgtttttgtttgtttgtttttctttttggatccattgtgacaatcttttaactgacatttaaaatgattactgttgtagttgggttaatatcttctgccatattttcactgttctctatttgttgtgcttgttcttcattcctgtttttgttctctctttttatgccttttgtggttttaactaagcatttaatataattccattttctctcctttcttagtatatcagttgtacatctttttttactttaagtggttgccatggagtttgcaatatacatttacaactaatttaagaccattttcaaataacactataccacttcaagtactttttaaatcacaaaatagtcctattcctccttcctatcccttgtatcattgctgtcattcatttcacttacacatgggcatacataaatatatatgcatatgtaattgaatacattgctgctgttataaatttgaacagtgttatcgagtatctcaagaataagacaaaagcttttcttttaccttcactgattccatagctaatgctcttcatttgtgtagaactgagtttctgacctatataattttccttccctctaaagagcttcctttaacatttcttgcaaagcaggtctattgacaaacaaatgtcctcaatttttatctgagaaaggctttatttctcctttactttggagaataatttcacaaggtacagagctttagtttggtggttttttctctcaacactttaaatatttcactctactctcttcttgcatgtatggcttctgaggagaaatcggatgtaattctttgttcctccataggtaagtgtgtttttcctgtaacttctctcaggaattttcattatctttgactttctgtaatttacatatgatatgtctaagtgttctttgagcttcctggatctgtagtttattttcctgcattaatttgaaggaaattctcagacattattgcttcaggaatttctcgtgttcctttctttcttctcctggtattcctcttatgagtatttatgccttttgtagttgtcccagagttcttggatattctggtattttcctagtctttttttttttttttttccagtttgggtagtgtctagtaagatatcctcaagctcagagattccttcctcagccaagttcgttctgttagtaagcctattagaggcattcttcatttctgatacagtgattttgatctctggtatttgtgtgtgtgtgtgtgtgtgtgtgtgtgtgtgtgtgtgtgtgtgtgtgtgtgtttggttgtttgtttttgagacatagtctcactctgtccaggctggagtacagtggcacaatctcggctcactgcaacctttgcctcccaggttcaagataatctcctgcctcagcttcctgagtagctgggattacaagtggccgccaatacgcccagctaatttttgtattttttgtagagatgggatttcaccatattggccaggctggtcttgaactcctgacctcaagttatctgcccgcctcagcctcccaaagtgctgggattacaggcatgaaccaccacgcctggctgagtatttcttttttattatttcttagaatttccttctctctacttaaactgcccatttcgggattgagtttatctgttagcgttcttagcctattagtcatagttgttttaaattcctgataattcacacatccctgccatatctggttctgatggttgctctgtctcttcagattgtgttttttgcctttcagtgtgccttgcagtttttttcttgatagccagacacgatgtactgggtaaaaggaattgctttaaataggacttcaggaacatggtggtaaggtgtggagggaggggagcattctacagtgttgtgattaggtctcagtagcagaggtcatatgtaatgggagcccacaggagccaaaattctgggggaagggaacctttggagctgtgattctcaagagaattaaaaagtctcttttgctcgctcgctcttgtgctctttctctcacacagatgtcagtaaatttgaagataaaaattgtccaatctgaacagagagaaaaaaattttgaataaaaacgaacagatccatggccgggcgcagtggctcacgcctgtaatcccagcactttgggaggccgaggcaggcagatcacctgaggtcaggagttcaaaacgaggctggctaacatggtgaaaccccgtctttactgaaaatacaaatattagctggacgtggtggcacgtgcctatggtcctagctatccaggaggctgaggcaggagaattgctggaacccacaaggtagaggttgcagtgagccgagatcatgccactgcactccagcctagggaacacagcgagactccatctcaaaaacaaacaaacaaaaacagatctataggcatccatgagacaataacaaaatatctaatttatgtcactggagttgcagtaagagaagagaaggtatatgattatgaaaaaaattggaagaagtaatggctgaaaactccccatgtttggtgaaagaaaagcccacagattcaaaaagctcaatgagccccaaacagggtaaactcaaagaaatatgttccaaatgcatcacagtaaaacttgaaaattaaaaatgaagaaaaaatcttgaaagaagcaagaaacgggcttcaagaatgacgctcatgtttataattttgaaaattaagtgaattgaaatgccattaccaaaagaaggaatagaaaaacagtaggtttcagatgggaagataatgagttttaatttgatgggcctttgatatacacaactggaattgcccagtaagaaattaaacataaaaatttggagctccagggaaattctgaactggaaataaggatgttgaacgcatcaccgtaactggcactgtggaaacggtatacagaataagaaaaggagaagttaggcttcagctagactatgcaataagaacaaatcttaaaatctcagcagaagaactcaatggaattttgtttctcactcatagcacagtccagtgcaagtcatgcagccacgtctgtccttagctttgccagcgggagcacgtgccttccaagttcaacatggctggggaagacatttgttacttacttccactcaccttccttgggcaaattagtccaatggctccaatccaaatgcaagggagactgtgaaatatagtccccctgtgtgtccaggaagggaaaatggtgcagcaaacaatgccaatgtgtctgtcacaagggccaaaggcagatccttataaacttagccaatgacaggatagaagtatagacaaggtgtgcccacctggactgcttatgagttcatgccacaattttaatagcttgtagtggaaacaaaagtgaaaataattgtcctcaaatacccatacctaataaccacttaggcttggctcctggtctaaatctgcccttcacctgaaatatccattcagtctcttatgtatccatgtccctatcacatctggatctctgtcaagtttcctctggctctagcattcgttatacctcaggaatgcaattgtcacacaaaactgaaactgagctcttcgaataacccttcttcacacctttgaacaactgtggactcttctgtgatttctgtgagggttttctgcaatctggatgtagaagaatgtggtgcaataggtcattctgagtgacgatctatttccatatgcatgcccgtatctcattggggacatacattattttaaataatgaagatggggacaaaactaattctagttccatttattcatattaatttttactggatggcaactatatgcaggtactttttaagacaatgatgatgcagtggtaaactgggagctaggttttctagtggggagatgtgtaatataatgtcaggtcatgatgaatactgtatagaaaagtaaagcaaaacaaggaaagagttttgaggactattggtactgttttagatagatggccaggcacctctatgagaagacgatatcggtacaggtctgcatgaagcaagaagtgagctatgcaaagatctgtggcgagagcataccagctggagggatcagatagggcaaaggccctgaggtagaatcaagcttggcaagaaagccagtgtgactggtgacagagagtggcaggctgtgagactagaggggctgatgaggcagggccatgtaggtttgggaaaggagttcaaattttggtccaggtgtgatgggaatttatcaagcagggaagtgaagtgatcttatttacatgttaaaaaatcactgtggtatgggtggagaattgactttaatgggcaaaggtggatgcaggcaaagtaggagatcgattgggaggctgtagcaggaatccaggcaggcacccgcccattccaagtaacataaaggagaaaaagcccagagcctgctgggaaggaccctgtgtcccgaggcccgtggtccccaacatttataatgtgctgagataactcctctaagtgggttgtgttcacaaagttgggtgggagtcctggggaggaggaagcaccccaatgcacctgtgattcaggaaaggcgtcataaagaatggacaccaggttgcctggcagacaagcatgggaatgacattctgggatgagaagatagaaagttgttattacagaaagagcttatttctttgtactttttcaaacttgattttttttttttgcagcttaaaggaagaaaaaatcatcatagtaaaagaatttgagaagataacaaagccaggagtaagtcttagatgatatagagtttcttaaatacagctggattcaatcatccctttttataaatattaatgtttatcacaaccaccatagcctgaaacattttaaagattctaaagtcttaactgtgaatgatgctgaaaagactagctacataacttctggagtaaatataagtgatgcctattatagactttagcaacttggcatctaatttaggctgtatttagttggacaatatctgctttgttttcagaagaaaaaaaagattctgtggttgacactaaaaatattattttgctatagctatcaccctcatagctctctgaacatctcaagttattacaataaatttttacaaagaaaatgtatcacttatctattcctgcctaacaaatcatcccagaacttagtggcttaaaacaacaaccatttcattttttcacagttccgaatattctggtctgagctggccgaattggggctgggtaatctaggatagctccattcatataccagccgtttggtaggctacttggtctaaggtcacatgtcactagttggtcacatgatggtggaagggtttccagactcaataaagagcaaactccaatatgtaagacctttttgggcctctgctaaaatcatttttggtaataccccattggccaatgcaagtattataacatgggcaagtctagaatcaagttggccctacctcttaatgggaagaaggatcaagacaatgcaaagggacatgcataccctgcagataggaggaattcgtggccactttttacaatctattatagaacgtaaatagaatggtcaccatactttgcactccttccaccttctgataatccaaaagtgtgttggtggtggtttaattccaaggccagctcacaataaaacctgtttagcatagagtaaaatactattaattcaaataagtatgccaaaccatcatttacaatacagattttatgggagaaacattttgaattttcattcagatcctaggatcaccaatgatgctctcacccagcagtggtgggaggagggagctatgcagaaagcccagggcaggctaaatagacccagcacttcgtcattagtaagagtaacgtgtagaccttctgagtgtaagaagccttctctcccataagtcaaaccctccccaggtaatcagacatgagacaaagatctttgatgattctggggtagatggtatttggggaggatgtgcatgagctagagaagtaatatcaataagaaagtgggggattaaggagtgcaaagtgttgggtatccaaatatgaacacctttgtctttagttcccatgtgactcaggttaaccataagtcagatattcaaagattattggcatctgattttgtcagatcacaaagctactagaaaacagactgtacattttttttcatgcttcttggtatgaaataaaaattaacacataaaatgaaacgtttttaaatgtaggaggatagaaaagagcactaataaaataattcaaatataatgttgtgtttaattatacatgcagtatcattatcatgcctttgttaaagatgtcagaaatcataagttgcatttagctttatgagaaatcatttaaccttgtgagaaatcattcatgaacttcaaaacaaatataatcaaaatggtgggtgaaattagttttagttcagtttttaggtagataaatgtttgctcagactatataacctaatcatcttcacgacttttaaaggaaatggagaagaagatgaaaatattgagagaaagcactgaagaattacgtaaagaaataatgcagaagaaattagaaattaaaaatttacgagaagatttggcatctaaacaaaagcagttattaaaagagcagaaggaactagaagaattgttgggacatcaggtcgtcctaaaggtgtgctacttaccgttgatatttaaacattgtgccttgcatggatataaaagtgtgtgggtatcaagagtaaccagcaggttggataaagaggggtattgtctcacaaactgaaatatctgcattgcgattgatcctatcaaactaaatctaggctctgggaatgcacaaaagaccttagggtgtttgggagtatcactcgataattcggagccctcaccctgcggaaaaggtctctcctgacctcaccaaacatttctggacattagaaacaagtgtcacaaacacaattgtttccttgaagaacaaccatggccaggcacagtggctcacacctgtaatcccagcactttgtgaggccaaggcggtggatcacctgaggttaggagttcgagaccagcctggccaacatggtgaaaccctgtctctactaaaaatacaaaaattagccgggtgtgtgatggtggatgcctctaatcccagctacttgggaggctgaggcaggagaattgcttgaacccgggaggtggagattgcagtgagctgagatcgcgccactgcactctagcctgggtgacagagtgagactccctctcaaaaacaacaacaacaacaaaacgcacacacacacacacctacacacataccaaaacaaccaaatgtcctaacctctcacatatatttgtattaccttatccttgtcggagtgcattccacttcctctcagtagaaaagggatgagaggcctgtatttatgttttaggagataatgaattaaaattcattttactttgaaaaatgtataaatgactctcaaaacagttttaataacctagagttgttttaaaaacaacatctgaaactcattggcttaggggataatggtgatacactttgacctgtttttctataacagtcctagagcagacagccaagatgtgcccagctactgtccagaacacaggaccctagcagagatggatttaacaggaacccagtgaagcttaagcttcaggcccctcacttgcatgaacctcttccaagatgctgcacctaagttagcatttgtaattgtttactctttctgttaacgagggcccccaagattgtacaagtttcagccccacaaaatttgatctgccccaggactgagcaagatcccacagagaaatgtctcgcccaccacactgcagtgacggattcaacctccctgcgtgtgtgttacccctggctccaaagtccaatgacaacctcgggcaggaaggggcttttctataacccttgctgagtacgtaagactcttgagacttcagctgaacctcccatgaatccacagagcatagtgggaggtgcggtgttagaaaaacttagcttctgagcttggccttgccacttactagctgtgtgacttcgggaaacttatttaacttcttgtagcatgagtcttaggcagggctccccagaaacagaccctaagacaactactaatggagggagaactctaaggagaatcctataggagatggagggaagcaggatagagctggggaagaagctgggccagaatacagctgcttcagaactctagtctcagcctgatcccatggagaactcaagaagtcatgagttgcatcacagaggctgttgcacccagaggtgggggtggggggtgtctgttagatcaccacatcagttagtcattggtctcagcttgctcccctcctccctccaccccctggctcccattccctgacaaggcagctctgctcagccagtgacaatctgatggagaggagattaagcatgatccattagcagtcacccctgcagcatttgagggatgggtgggcagacgggccctggcttatgatggttcagcttatgatttttctactttacagtggtgtgaaagcagtatgcatttagtagacaccacgcttcaagtacccatgcaaccattccgtttttcattttcagtattgaataaattacatttattgtacagtattcaatatgttatgtttatttactgtgtggcactcaacactttattatataataagctttgtattaggtgaactgtagactaataaaagtgtcctgagaatgtaggctaggctaagctatgatttcagtaggttaggtgtattaaatgcattttcaacttaaggtagtttcaacttacaacgggtttattgggacgtcactccattgtatgtggaggagcatctgtacctccataaagggaatctgggcagaggaccaacagtatttgctacactcagttacctcctcttcaaaatgataacaaatatagctctcttacaaggtcaccgtgagtattaaatgggataattaaagcacacagggcagatggtaagtatctacatattgtagttcctttctctctcatatttaattttcttgtcttaattgcttctagccgaagaccgcataatttaacatgatttcgtttctttactaggatgaagtggcccaccatcaaaccattccagtacaaattggaaaagagatagaaaaaataacacgcaaaaaagtgtatgatttaatatttttactttgaatccctgccagtccaagttatgtgtgcacactagaacaagagtactaaccattggacacattaaattactatgataattttagaaatttctgctttgggccctgtctaggttgtttatatcaagttctttaaaagaaagtaatgcaccaaatttctatcattcatagtatttatggcttaattatgggtcaagattctgttgccaatttataaatcatatttttatggagaagttcaattgactttaacagagcggtgcatgggataaattatgcgaactggttagaatttcatagtctagaagtatatcagccaggcagcagcccaaagcccaaataatagtaactccccactttgccacccattcatgtgtataacactcctcagatattcagagtagattgggaggcagaggtcattgaggaaattctcagtgtttaaggaaccaaaaaagataaagattttaagtgaagatacaaaaattttggaaaaataatataattactctggtgactaatcttaaggggaaaaattaggcaggcactagtaactgttctaaaaactaagctcaccaacatcaaagttgagaaactcaggtcagtttcaggaggctggtcaggacgagggttgaatcacaggagatggtagcaaattgggatctgcacagaaagtagggaggctgggcaaattcctgccttccgtggcactcagtggagataccctccaagtcccacccatctgtggtctttacccactgctgagatcattgaatttatgactatctcttctgctgcatggttagaaagcaagaataggtaaagccagcatggcctcaaaataaggcaagtgtgtgtgtgtgtgtgtgtgtgtgtgtgtgtgtgtgtgtgtgtgtgtatcccctacagagaaatggaaaagaaaaaaattgtcttggaacaagaagtcaaaacgctaaatgactccctaaagaaagttgaaaacaaggttagtgctatagtggatgagaaggaaaatgtaataaaggaagttgaaggcaaacgagccttacttgaaatcaaagaacgagaacataaccaattggtcaagctattggaattagccagagagaatgaagcaacttcattaactgaaaggttagttatatttatgtatgttatgttctgtcatctaaatttttcttcaatttatatttgagaattcaaaatctcactttggtgttgagttaataaatatttaaaaataattttaaatcaacttttacccttaatatattatcaaataaagcactttgaagtattttttgatactttactcaaattttctcaattttctgttaccagattttcaggatataatctgttgtatgttgtaagtttctgaatgtgcctttggaaaatttatcactggagtatgttatgttcagggattttgccaacaaatgaatgatacttcttaggccatcttgacttttttctaacagaagcaatttcgtggtgtaattccctaggagagttttatgtcctgcttttttgtttgttttttgagatggagtcttgctctgtcgccaggctggagtgcagtggcacgatcttggctcactgcaacctctgcctcccgggttcaagtgattctcctgcctcagcctcccgagtagttgggactacatgtgcgcaccaccacgcccggctaattttttttttcttctcattagagacagggtatcaccatgttggccaggtggtctcgatctcttgacctcgtgatccacccgctttggcctcccaaagtgctgggattacaggcatgagccaccgcgcccagcctatgtcctgcttttaagtaaaatttcaaggaaactggaggcttctatctctgccagtctgttatttttttggggggtgggggttataagactgcagttctaaatgataccaactcacaaacctagttgcctttggcattatttacaatttatgattccaacatgagaatagtcatgtgtgtatatactgagcatgctgtcttttattaaacttttaagttcaaggttacacatacaggtttgttataggtaaacttgtgtcatggggggttgttgtacagattattttgttatccaagtattaagcctagtacctattatttttcctgattctctccctcctcccatcctctaccctccaaaaggctccagtgtgtgttgttcttctctatgtgtccatgtatcctcatcattttgctcccacttataagtgagaacatgtgatatttggttttctgtccctgcattggtttgctaaggataatgacctccagctccacccacgttcctgcaaaggatatgatctcattctttttattttattttttattttttattttttgagacggagtctcgctctgtcgcccaggccggactgcggactgcagtggcgcaatctcggctcactgcaagctccgcttcccgggttcacgccattctcctgcctcagcctcccgagtagctgggactacaggcgcccgccaccgcgcccggctaattttttgtatttttagtagagacggggtttcaccgtgttagccaggatggtctcgatctcctgacctcatgatccacccgcctcggcctcccaaagtgctgggattacaggcgtgagccaccgcgcccagccctcattcttttttatggctgcataatagtctgtggcatatgtaccacattttctttatctggtctaccattgatgggcatttaggttggttctatgtctttgctattgtgaatagcactgtgatgagcaaatgtgtgcatgtgtctttaggatataacagtttatattcctttgagtatatacccagtaataggattgctgggtcaaacggtagttctgtttttaggtctttgccagaagagattgggagccaatattcagcatgctgtcttgataagttttgaaaaacatttaggacagctgataacaaaatcattttcttcttcttcctttacctggaacagagggatcttggatctcaatttacgcaacagtctcattgacaagcagaactaccatgatgaactttctcgtaagcaaagagagaaagaacgagattttcgaaatttaagaaagatggaactgctcttgaaagtgtcctgggatgcacttaggcaaactcaagcactgcatcaaaggcttctattagaggtgagggctgtaaactaccatctgatttttaagctcggtgctaacttttgaagtaaaaatattttaggaagttgtttttgctgccagtagagaagaagaaaatacaagtaacagagaaaaggtaattttcaaatgcgtcaagcctattatgaaatctatagtcctataatgtttcgtaatctcatttttctaacccaagattagagaaatatcttgtttggatcagtcatccttcagcctgacctggggaaatgactggactatccagttctagaagagctagagggttcactgcagaatggggccaagtggatcattattttcaccagttgaaggagtcagatccggcatggtgtcatggcagactataacagtgaaggactagatcaaattacatagacatagatgatcagcagcctgcacttccgactagccaagggcaatccagaacccaatatcaggctgcctggctaattctgtgcagggtcagaggtgtactccagtcagaagatgctcaagacaactgttacctgcctctgtgttcccaagtgaggggtctggttgcccctggctctcttttctctcagagggcactccctgtggtaaatgaccaagcgccactgaaagggcagaggatccttgagagggcttcagccttgtgctagagccttccttgagcgaaaaaggggtcagcctctgagatgaagcagctaggtgtatagaaaccttccccattctcttcaggactgtcatgctccagaaccttatggagggtcatgacctaagaaatttgaacaggagtttccagctgtggtagacacctctgatcctaacctatgcctagttctcctctcctcctgggcacatagaaagtttatacttccttgcaccctttgcagttgagcagagtcatataactcattctggccagaggattgtagacaaaagtgacacgtgtcacttccagcctataacatctaattgccaatgtgagaccctctagctgtttttccctctcctgtggtaattgtggaagtgcatgacaccatggaggtgctgtaaaatgggagcagccgggaatgctgagccaacagtggtctcagagtcctcttgattgcccaccggctttgtaggaaacagctttggtagttcgaagccatgatatttggaggtcgtttatttctgtagcataacttagcctgtcctgactgaaagaccaaccttaagcaacatgtgtgaaaaaatcggttagggttatgagtgttacgaacaactaggacttggacttcgtcttgctgtcagatggcacttataatcttttcaagaagttctctggttgggcacagtggctgctgcctgtaatcccagcactttgggaggccgaggtcggcagatcacctgaggtcagaagttcaagaccagcctggccaacatggtgaaaccctgtctctactaaaaatacaaaaattggtcgggtgtgctggtgcacaccccatgatcccagctacttgggaggctgaggcaggagaatcgcttgaacccgggaggcggaggttgcagtgagctgaggttgtgccactgcactccagcctgggcaacagagccagactccatctcaaacaaaaaaaggaagttttctatctcagtgaggcaaaatgtacttttatagtcttttgcaaaaccaataaaacatgtatgttctactatatatgtgttttcacaaataacttttatataactgttatatatagtatatttatgatatatatacttcttatttaatcattttattgcaattccaacaggtagatttatttgtatcactctgaaatctctttaactctagtagtactttttgccttaaaatattattttgtctgattttagaataataacatcagttacactatcttttggcgtgttagattctgcatggtattatttactttgatttttttttctttttctttttggagacagtcttgctttgctgcccaggctgaagtgcaggcaccatctcagctcactgcaatctccacctcccgggtttaagcaattctcgtacttcagcctcccaagaagctgggattacaggcatgtgccaccaatacacagctaatttttgtatttttagtagagacaggctttcactatgttcgccaggctggtctcaaactcctgacctcaagtgatccatctgcctcggcctccccaaagtgctgggattacaggtgcgagccaccgcacccagccctatttaccgtcactctttctgtgtcctcattttggtgtgtctcatatacacagcacatacttttcaaaatctagtctgataagttctgcctttttaaattcttgtatttagtctaaaaattaatacttaatgtaattgtggatatatttgtcctatcgctgtgatattacttttgctttctctgtatcccatccgcttcatgttccattttctctcccacatttccttccttgggattaatcaacgtttcatatagttctgctatccttgttttagatatgcatcagttagttttacattctatttctattctttgggtggttaccctgaagattacaacagtcatctttgacttactagagtcaaatataagttatttgtatttttactacttccaagacagtgctaatacctttgatgattttaactttactaacctttgcaactcttatgccctcaaacatattttcactccaactttccaagttattcttgttggaagcattggtttactataagctactccatcttagcccgaagcacagcacgttaggatgttaaattggaactttgggcaaacacagaccctgtggccacccctcctcagtcatagtaagatttatagtagaccgcagttataatgtccattcaaagtactgacggaaacctcagtgtaatgagtaagactcttaaaaccagcaagtgttgcttgtactaataaaacaattcctgtttattgatcaaataactgttcagtaagatttctttaaacaatgggataaaatgtataattacctttaataaccaattttggtagttatggtagtaagtaaagttaatccattcaatatgcttctaatgctgaatcatcaaagcattcttaatattgaagagtaaggtaacctaaatagaagcaataatttgtctcataaattaatacttcttagctcaagaagggttatacattggtaaaaatcacaagattggttctaaaagactacacacaaaaaaacagacttaggttcacttctaccagaaaatctagattaagtaccatagaagggacacataaacctaatacacaatgtaatcctactacttccacttctagttaaaatagaaaacattgtgatggaccatcgtttctgctataccagccagaaagaaatcaataaactaaaaatcacatatttttaagagacatatgcaagtaggaagtaaattccacaaaggcatcatcacttcctggtgagcagaaacaggtggccttttgcctccctgagacatttgccaagtcgagacttgggcaggtggaagatttgcctgccataggcagaaagactttgctggggttagtcaaaaccatcagagcttttaatgaccatgtgtgttggcatgacaaagtggaatgaattacttaaccaaagacatcatactgtcatgtaatatcacacatgacggtatacctctgcatttaaacatggctcttattgacttccacgtggcactgaaaagaaagaaaaccatgattcctaggattttgctctgacaccatcatgttgtaggggttagaatatcatgagtctgtgaagttatttgctttctaaacataagatcatgtccaagattgtgacaatgacaaaatcctcttaccaagtgaatatgacactttctatatactgtaatttttctttaattatagttttctagcaatttcatctccctttgctctgatttaaaagtggttctgcatttttctctcttcatgactcatttcagtgttgaaggcaatgataacaacatactatactgagaagagcttcacctttgagtcaggcacagtcaggttcagattctagatccattgaattcctacctatgttacttgtttccaaacctttgaattgggattattgcaaaaaatgagtgactgcaaatgggaaagtgtgtggtaccgagaagatactcagtaaatattgccttccttcctttatacatatgaactctttgaaaggctataaagtaaatggtatagtcagaatgacactgtgaatatggctattttattcatatggagaagatgacatcatcaggccctactgataaaccccggaaatgcctctcagtacccactctgcattacctaaatgactgcagctctacaccagctgttctccataggtccagctcctttcatgtccaatttttcctccatcttagcccaaagcacaaatttatattcttaagtgacacattcatgtgtcactcacctgctcaagacattcaatggatccttaattcacataatcacagaatgaaggaaccaagaggaatcttaaagatcatactataaaagcaaacaggtttcatctcaaatgccagctccctccatttgggggtagctccctgtagtgatgataatgcaaaggaattttttttttttttttgagacagagtctcactctgttgctgaggctggagtacagtggcaccgtgtcggttcactgcaacctctgtctcctcagttcaagcaattctcttgccctcagcctcctgagtagctgggattacatgcacccaccaccaagcccagctagtttttatatttttagtagagatggggtttcaccatgttgcccaggctagtctcaaactcctgacctcaggtgatccacctgcctcggcctcccaaagtgctgggattacaggtgtgagccaccgcgcccggcccaatattgcaaaggattctgaggcccagtgctgacttgtcagatagaagctctgtagttgattggtgatgtctgccccaggcatagaaagtctgtccatgtatttcccattcctaatcaagtcatcttcctaatcaagcgctgtttcttcagccagttcttttggtatatcttcataccccaagtaacatgcttatgatgctgctacttgagttttcagttgtagacttgatcttttttttttttaatcactataaaagatgaggattcagccctctttagacccctgttcatcacaaatacatttcttgtccctctgtatacacggtattctcatgtcataattttgattagttcagaatttgttattattatgaacatataaaggctattcgtgcctgagccatgtgatattatataattacccttacaaaattttgtgttcccaggaatttataaacatcctgtttttacacttttatagttttcggtgtgcttatcagttcaatcccaaattcttctccaattatataaatctcctctcagtatattaaaacacatttgatggcctattcatttactcttcttgaagaaatctcttctaagcctcatcaatgacctctagccaaagactaacaggaatacatcagcagttgaatgagctgagtttattacatattgcagcaagggagaacacacgccatggagaattgtagggagtctcaatagagggtattagaaaggacttacaggatatgtgtcatgtgacttgaggaacggtttaaagaaatgggactttgccctgaattaggatgttctcaggaaatgagagtaattctgtggtagagtatcttaaattttacctagaaaaagaaaagattagatggagaccaaaactgtgattgttaaacaaagctatacaaggggaatttatggtattttgtggcttggacaatgttcatgtttttgtctatgttcaaatacagttatggagtggccttgtttttgtcctgatccatcatgattacagaggggctttgtctgaagttgatgttctgggcaattgtttatgttcaacaggggaataccaaggcctacctatgagtaccagttctgctcctggatatcaggggctgcctttttctttctcagccttctgacttgttccaaagtagtccatttctgtatgtgcttactgcactgctctcattctaggagccttactccatcatcttgctgatgcccttcacctctcttccgactctatttcatgggtctcatctattttattctcttagcttacccccttttggaggaggggacatgccttccagtagcttcatgagaaaaatgttagtgaaaaagtaattgtttaagactttgtgtgttggaaattgtatgtcagaagaccttgcatgctaaaaaatattttaccctcacactagccatacagacaattagtgctttaattggatatggaattttaggttggaaatcattttccctcaggaaaaaggcattagattaactgccttctagcttcactatgaagaagatttgatgtcattctaaatattgatcctttatttgaagccatttttttttccatgctgggaaatttgtaggatctcttacttgcctccagaatttttacattttacaatgatgttcccattgtatccatcgtgtggggcactgaatgggttctctgtctatggaagtatatgtccttccaaagttctgatactttgtcttggattatttaattttgtccatttgattttctctattctgtcttggattccttttacgcagatgttggaccttctaaaacagtcctctaattttcttttttcttttattttcctttcttttttgtcatttgacttgctaaaagagaaatttcctcaagttttcctttcaacccttctactctttcattatgctatcatactttatatttccttgtgctctctttgttctctggatgtttctttttcatagtatctttaatctcttatctcattgaggctattaatgatggtttctttttcttcttcttttcctaaataagactttttctccgtgttttttctgtatttttctttttttgtttttgtctctttctttttagaaactttcctccaatatatggtaattcttggctatctgcttatatttaagcatgggctgctataaatctaattggaagctgtctgtgatggtgaggcttgtcactgtagtttgatctgactggacacaaaatatgtgaggcatggcctttgaccgaagaggagtttgcagtggaatgcgcacaagttgttcagattttaacaaatattataaaagctatttatattatgacactactagctattaagtccacaaaatagcacccattgaatataaaactaagcgcccatagaatataaaactaacagaaattaaagtgtattagaatccttttcctttgttgattttaagaaaaatctggttttgttctagtacagtttcagtgagagactaacttcctctttgaccctgtgatttataattagcccagccactgcccacagctggcagtacttgaaaacaggagtgggtcaggccaggcactcccagcccaagtgaacattttttcagacttgcatgcaatccaaaactaaaagagataaaaggtaaacatgaagagctctagctattcttcagaatgtatttccccccagagacagttgtttgattctcctatggcgtttgacttgtacatagagactctcccagaaactcaaggtacaagcctcatgaaaggttggaatgctttagaaaaatatcaaagtgttaagctgaggttcactgatatcaaataattgggatatttacagcaacaagtaatgtctaatttcttaacttttatgaaagttaccgatgattattcatgcattgaaaatgcctggaagaacagacaccaaaactattaatagtgactcctggggagtagtacttgaagcagcagaggtaggaagcagattttttttttttttttactttacacatttctgttgtttggtcacaatcacaataaatacatttttaaatgtgaaatgctacactataaaaactaaaagaactatcataagcttacaaaacctgatatatgcagtttggggctcaaaagaaatggaaaatatctcaagtaactccagaccatgtagttagaactttgatacttgatagttattttcctcccacattaatggagacttcagtctaactccagcctattttccagattaccttgggaaggtttcctttcaagagaaacacctattaggttaggtttgcaatttggcctcaatgagtaatagaaactcaactataatgattttgctaaatagggagttgttttactcacttaataaaaagagcacaggtaggcacaacaggttatttcacataatgaaaagtctaggatccttttagctcccctttcagtcaaccttagtgtgtacattgtttctccatggtcagaaaatggctattccaccttaagcataaactggcaaaaggaggaggaagggcaacgagcaaaagacataaatgattgctggcttggccagctccttttaacaggaaaacagccactttcccaggacccctcctcacagacttccacttacatttcattggcttgtcttagctcatatgggcacccccagctgcaaagaagtgtgaggactcctggatacattgcagctctggaaaaaaaaaaaaaaaacagcattctgttgctgtcgtggttaatactaaatgtcaatttgattggcttgaaggatacaaagtattgatcctgggtgtgtctgtgaaggtgttgccaaaggagatgaacctttgagtcagtgggctggggaaagcagacccacccttaatctgggtgggcacaatctaatcagctgccggtgtggctagactataaacaggcagaaaaatgtgaatgagagaccggcctagcctcccagcctacatctttctcccgtgctggacccttcctgccctcgaacatcggactccaagtttcttcagttttgggactcagactggctttccttcctcctcagcttgcagatggcctattgtgggaccctgtgatcctgtgagttaatacttaataaactcccctttttattatatatatatatatacacacacactaataggagatatatatatatatatatatatatatatatatatatggagatacaaagaaccctgactaatagagttgctaagatcaaggtggagggtagctattggctaggcaaccaggaggtctgctaccaatggcttatcatgtcacctcttccacaagccaagcctacctaattcctgcctgaaactagagagctgggctttacagagaatttaaaatggtatcagagaagcagtagccagagttcaaaaatgaatacaatttattgaagtattgtttgtgtttcaaaatattggaaataaccaaagtgtctagacctcaagccagaaaaatctgtcgagagcctttagttgacatagtagctagtgagtgtgttctcatcatattttctgtcgaaacctcataagggttcctgggccctgttattcacgtttagatctgccgacacccgggagctgagcatgaggacagcccactccaggcacacctgtagcagagaatcagacagggacccaggatgtttgctggagttcctctatccaggaggtcttaacttgactttcctaaaggagaaatcaacacttccttgatgaatattcacatcttccaggaaggctttcccaattattcaattctatactgagttctcccttttctgatctgctatagcaattttatgtttgttaagcccacaacattctgtatattgtcagacatgtttcacaagaccacatctcgttttcctaagtccagtgtgtgcatctcaagagctagtgctccagggtaggagacccaatggaaaagcaggacatggacacctgagggtacagaaggtgctactgaagataccctgattcatggatgatggggcatccaaagacacactttagtgactttaacatagcagcatgatcctcaaaaagatcctgttaagtaaccttcaaatcactagacagtgtgatattcctttcttgggtctaaattttggccattattcaaccttagggcctacaagtgtgtgctgtcacagtaggaactgaaccacatcagattggagtcatgtgcttttggtgtaaatagccaactctaaacttgctctaagtcaagtaggctggaagcaccccaagatgaccctccctgtagccttgaatggtaccctttccccatcagctgccacatgtcctcctctctactctcgtcttcatcacaaagaatctgacaagctcattcctaatagggcaacaaagacttaaagagtgagatttgccttttccctaaagtacgtcaacacaggagaaaagtgcaagccgttacaacagaaatgtaatggtgaaattttaggtatcaaccaaaaagttgaggcttttcttttgtgtaagaaatttccagctactaatcaaatgactatatataagtagcaaactatccccactattattaataaattacatatttttctttatcctatacaatttcataaatgtactcacattttataataactataatttgaatagtcatagtatattcatgtctccaaagtgctgggtcatgagttagatgagttaggcagatcatgggttccaagtctacctccctgggtttacacctgcaccattgaggcaagttgcttaaatgtgtttgtgcctcattctcttcatctgtacaattggagaaaatattccccacctcatgaggggtattgtaatgatgaaataagatcgtatacacaggcatttagaaccttgctggacacttggtttatgttcaataaatgttagctattagtaagatttatttctaaataataaacatttgcagctggcaaattatagatttttggcaggtcttcatattttaatttgccatggcttataaagaatatttggcataaagggaagttcttataagattgagattcgtgatttgctcagcattttcaaaaagtgtgtgatgaggttgactacacagcagtgaattttatttatttatttatttatttattttcagacagagtctcactctgtcacccaggctggagtgcagtggcacgatctcagctcactgcaacttctgcctcccgggttcaagcaattctctgcctcagcctcccaaagatttatttcttacataaatgcatgtttttaaattttgatttccagatggaagctatccccaaagatgattctacattatctgagagaaggcgagagcttcacaaggaagttgaagtagctaagaggaatttggcccaacaggttaatatcaatgctcatttaagcttctatctaagaagcgttcatacaaagttgtgcttttaactgtgctccacaaaaccttatcaataagagagtcatcaaagagagtatgatcctgcttcatgtgggcatatttcttcatctcaaagtccactccaatcctacactaaatttgagaaaaaagaatatgtttgaaccgcaaaaagtattcaaaggaatgagatttttaaattatgggctgttgattacattaaaagtaaaccacagatgttttatttcaccaatgtctaatttcaaattttcgtttgtttttatgtgtcttctttttcttagtcacttgaaaatacagtctaaatacaaagaggttctatcatgttaacccatcgattttcacattattttacaaaatgaaaacaatgaagctaaaacaccattactttatttttaatttttattttttttatagagagggatcttgctatgttgctcaggctggtcttgaactgctggcctcaagtcatcatcctgcctcagcctcccaaaggcttgaattacaggcgtgagccaccacacctggcctgtttaaaaaaatacattttgtataggaagtaaaaaggtagtctaagatactagctttactgtattacttcaaacaaataacttataatattatctgtgttttttttcaaaagaaaattatatcagaaatggagtctaagttagtagaacaacaacttgcagaagaaaacaagcttttaaaggagcaagaaaacatgaaagagctagtagtcaaccttctccgcatgactcaaatcaaaattgatgaaaaggaacaaaagtccaaggatttcctgaaagctcaggtaactgcatttttttaaccattcattgataactacaagagttcagggtagcctcattataatgccacgtgcattaggacatggatgaagctagaaaccatcattgtcagcaaactatcgcaaggacaaaaaaccaaacattgcatgttctcactcatagatgggaattgaacaatgagaacacttggacacaggaaggggaacatcacacaccggggcctgttgtggggtgaggggagcggggagggatagcattaggagatatacctaatgtaaatgatgagttaatgggtgcagcacaccaacatggcacatgtatacatacgtaactaacttgcacattgtgcacatgtatcctagaacttaaagtataataaaaatatataaatattaaaaaaagaactggaaggaaactcaaaaaaaaaaagaaaagaaagctatacaattgacccttgaacaacatggatttgaactgcatgggtccatttatacacagatttttttcaaccaaatgcagatcaaaagtagagtactcacagaatacaaaacctgcaaatatggaaggcccacttttcttacaggtgagttccacagggccaactttgggactgcttgaatatgcttggatttttgtattctcaaagggtcctggaaccagttccctatgtataccaaggaaccactataactgtgcctctccttcaagtaccagtgactataaatcttccctaaatgagattcaatcatgcactgaaagatagtcccaagattcaattaacagtaatcaacaatttagatgggaaaggagatcattgataatgatcggaggatttgaacagatggcaatttcagtaagaataaagtgggtgcctccagtggacagggctggcagctgcataggctgcagatatcatttagttttcactcccatctcagactccactgtgatttgtccaggaacaactcaagagtggtagcattaggtaactgtccctcccaacttcatcaagacagcatcatttaatcgaatgccagatacccttagttgcttcatcacaccatgattttcctgggcctcctacaaagtgccagtgcaacattcccccctaaaatcaacaataaaacaaatggtaaggcagcactcctgtcatgcaagctaaaattctaccattagaattgtttattccatataaggattatgtccagatcatgcccagaagctccctgttaaaaataaacaggatattacatattactaaaatagaagaatttatcaggccaggcatggtgactcatgcctgtaatctcagcactttgggaggctgaggcgggtggataacttgaggtcaggagtttgagaccagcctgaccaacatggtgaaaccccatctctactgaaatacaaaaattagccaggcatggtggcagatgcctgtaatcccagctacttgggagactgaggcaggagaatcgtttgaacctaggaggtggaggttgtagtgagccaaaatcgcaccactgcattccagcctgggtgacagagcgagacttcctctcaaaaaaaaaaaaaaaaaaaagaatttatctcatgacccagatgtggtctgtttggtctgtttctaagcacatcccttgttctcagtctaagtaaggatttacatagaatggtatttcttctcattctgcagaaagagctcactcacaccaaagcattagtgagcaatgaggtatgaagtagatttttgcaaaaaagagaagatctacattgcacaacccactgcaggcacttcacatccccctttcactgtttatttttctactttaatatttaagaaactaaaagaagttcaggatggctggcacatgggaagatggggagaaaggatgtcaaatagtgagaccagagagcgggacaagtcagatgatgaaagtcacttaatccatgttaaacaatttagactccataatgaaggctgcagcaagagtgaagttcatggagtagttgggtttcactaggtaaagaagtggtcagggaggactggatgaaagaaaggcagcttcaaagcacagggtggctaagcgggtaagatgcaggagcaggacaaggagaggagagaggagagatgtgagaagatcatcttgggccaggagcggtggctcacgcctgtaatcccaacacgttgggaggccaaggcgggtggatcacctgaggtcaggagttcaagaccagcctgcccaacatggtgaaagcccatctctactaaaagtacaaaaaattagcctggcgtggtggtgggcacctgtaatcccggctactcaggaggcagaggcatgagaatcgcttgaacccaggaggcggaggttgcagtgagctgagatcgcgccactgcactccagcctgggtgacagagcgagactctgtctcaaaaacgaaaaataaagaataagaaggaaggaagggagggagggaaggaaggaaaagaaggaagaagaaagccatcttcaccaagtcagggtctgggacaacttggtgttggctgggaagatcccactcaagtgagtctttcctagttagaaacttcctcccttttctctttagaaattacagaaacaccagaggtatacttatttgttataagaaacactgatccgttttatgaattagataattttcaattaatttcaaaaactgatatacatgtatatctatgtgtgactaatctatgtaaagcaaacctcattattaaatgagctaatttgtattaaaccaaaatagacaattcttcttgagatacagaaattgataaaggacaaatgtttatcccttgagtatttttagcattaggaattagtgtgttaaacattacctgtacttagctgcagtttccataagaaggcaatcttttatgttcacattgcatccacatccctaaagacaaaggtgaagaaaaaaaaacaatgtcactatcacccccaagacagaatagatgacactacattttcccatctgttttattattcatgtgtacagttacttaaatattcgtttcttcctgacccctattctcatggagaacagcattagaaaaatgctacacatcaatcttggctctatggctagtttctttcaaatcactcataccaaaagggctttgctctcagtccttgagagaaggctgacaaactctttcctctggtttctagcagcaaatccttcatttttgaatatgtttcttatcccagatgcaagaaccagtatcttttgatttgaagaacataactagtgtatttagcacttgatatattttttagaactctagaaatataactgctttcttttaaaatatttatgtgtaacacctccttacagctgatctcaatatgatgccttattatgtaggaaaacaccccacatacaaaagaatggaaagcactttaaaatcattgcttcagtctctgacaaaacaccacagagggttcagtttataacactcaccaaaacttactaggaatcctcttctctcatctattttccataaactacactcacccagtccagctgtgtggttcaaaatcactcttcctctctctcaaaagttgtccaaacttttcctcaaacccaagccatgcaggctctttgcgttttctcttctctcgtttgttctcttccttaggtaacagttaacagtttgtcttagccaatgtgaatcagttcagctagccagggaattttcagatctcttttacccttcaccctgatctgtacaacccagcaagccaagaaataatttttttttttttttttttttttttggagagacaggatcttactttgtcgcccaggctggagcggagtgatgcaatcatggctcactgcagcctcgaattcttgggctcgagcgatcctcccacctcagcctcctgagtagctgggactacaggtgcacaccaccatacccagataatttttttatttttgtagagatgaggtctcactatgttgcctaggctggagaattgtctttaatggaagggaatgatgtgggataaatctgggagtgttcatatgttgttatttatttcacatttttttgtacatttcagcaaaaatacaccaacattgttaaagaaatgaaagcaaaggatcttgaaatcaggatacacaagaagaaaaaatgtgaaatttatcggaggtaaagtaattatgtggtgttttatctacgtaggtgaggggaaaaaaacctgatgttcatttcataagtttcagtaaacactttgtatttttacagactgagagagtttgctaaactgtatgacaccattcgaaatgaaagaaacaaatttgttaacttactccacaaagctcatcagaaagtaaatgaaataaaagaaaggcataaaatgtcattaaatgaacttgaaattctgagaaatagtgccgttagtcaagaaaggtaagtgttataataactattggcctttcaaaggcttgttttctgattcatttgaactctaaaaatcctggggataagaagataggaaagaggcagaggctgcaatgagccaagatggtgccactgccctccagcctgggtgacagaatgagaccctgtctcaaaaaaataataaaaataaaaaataaaaagaatagtattttagaaagccagaattagaaatccagaaaaagcccttgttcaaacatcttgttttatagatgataatctaccatgcttctactctttgggagtcatttttttaatgaatgaaaaaccataacatataactatgcttactatgatgattttcacctgcccaattagaaagaaaagcacaaatctaataattgggattgggaagttagaaaacaatcaaatcgtttgttaaccaacatcccctgattgtagatgtaaagcatctcatgtgttgtgggaggcaatacgttatagcagattggtgaaagaggtggtgtccagactcaaataccacccctcccacttattacctctgtaaccttggacaagctgctttgtctctctgagctcactttccttatccataccatatttcatgcgacattttactgtgaaatgagctaattcatataaaaacactcagaaaagcgtctggcaaatggttgttttcttcatttattatttaccatgtgccaagatcttctggactctttcacctatgttagtaaacagtacacgatcagggtataatctaattttctgatggccattattgcccagtttccttcaacaaagcaattataaagtggcctcatttcaggggtcgggggtggatgaaaagaaaaatatgatttcctaatcaggttctcatccaacttgaaaataaaatacatttatagaggccatgcattcattcagcatttattgtggccacaggctgagtcaggcaccaccttatgtccagtggacattattggatataaccatctctgtcctcaagacagcagtctcctgagaatgacaataaatgaatgactgcagtctctcgctttgataaagggggtcagcagaacattggggggaaaaggaaagatgttctaatctggagcagagaaaatctgagacctggaaggattatgaaaattcctgaagagtatcataagatgaatatcattattactagtatcatttcaagggctacactaaagcaaggtctgctttgatagtgcttgtgtttcagaagccttcattccttttaaataaactaaagaaaattataatcttacccattgtcttattactttaaaagaaagctacaaaattccatgctgaaacacgccaacaatgttaccatcagagagagcatgcaaaacgatgtgcgcaaaattgtatcaaaacttcaggaaatgaaagaaaagaaggaagcccagttaaataacattgacagacttgccaacacgatcacaatgatcgaagaggagatggtgcagcttcgcaaaagatacgaaaaagctgttcagcatcgaaatgaaaggtaaaaaccaggtgtgagaacagagcaccagggatccaactgaggaatgtcacctctttttctatctagacttgacagtgaatagtgagggaaatgtgatattcaggttgcattagcctttggagagaagggactgtgtgttgcttccctggaaaataagaaacactgtcctcacgctgggcacagtggcatgatcccagcactttgggaggccaaggtgggtggatcacttgagctcaggagttcgagaccagcctgggcaatagggtgaaaccccatccctactaaaaatacaagaaattagccaggtgtggtggtgggggcctgtaatcccagctacttgggaagctgcagcacgagaatcgcttgaacccgggaggcagaggttgcagtgagctgagatcgtgccactgcactatagcctgggcaacagagcaagactccgtctccaaaaacaaacaaaaaaaaaaaaagagagaaagaaagaaataccgtcctatgtcataaacaggcaaagaggaggggtttgggaaagttgcttgcttttgaagatcaatgtcctttcctaagtggtcattcgggttgcctcttataacatcagattctttcagcataattgacataaataagtgtggaacttgtacccaatgttgtggtaagtttggtcttattatatttagccattctcctagttcatttgctcagcaagttagtaagacctttaggagtagcattatttcttccaggttgcagttatatcattaatcaatgtttacttcagcagtttctcccaagttacttgtgctctgagaaattggaatgtgaaatttgcagagccctgtgataatgacatctgnnnnnnnnnnnnnnnnnnnnnnnnnnnnnnnnnnnnnnnnnnnnnnnnnnnnnnnnnnnnnnnnnnnnnnnnnnnnnnnnnnnnnnnnnnnnnnnnnnnnnnnnnnnnnnnnnnnnnnnnnnnnnnnnnnnnnnnnnnnnnnnnnnnnnnnnnnnnnnnnnnnnnnnnnnnnccaggcttctcgttgtcaagagaacttgatcttgagcctttgaaaggaaaacagacaaaatatagagctgggattagctgagtacaaccacatgcatgcatgttttgaggaaggggagtcatagatagaagcaattaaaggaggaactctgaaataatgtatatgcataatgtgtgggaagacctttagggtcctttgaagaacagcacattttcaaagggctggtaggtttttctccaggggagaaaaaaaatgctattcagctcctggcacaaaccaaagcgtttggacaaacagtgtgcacccaggtgccactcagatcagtggtgcatgatcggtcatgcagaccagagctgctggggttagaacattcttactttgtttcctccccatattctccattcaaggaggggtctttctcctggcatgattacaaaggatagatttttgcctgtttatggggaaatcacaaccagaaatattcaacttgagaagaaactaatgggcctagcaacttaatatagagcagactcacaccagaactacattccctggccccctgcctgtgtgcttctggccaggccttggttggcaagtctgacccgagaaaaggatctgcagaaaatcagactatgggatcactttgtttgtgcattgggaatgacattctttcccaccccaggaaaacctttgggactttcagagacattgtggctagccaaccacatggtcagcctcaaagttgagaggctcagtaaccctcctatccctagagaattccaaagtgtggatgtaatttaactagaaagccattggtgactatctgtgatcctctggaagtatgctatgttgtgtatatcttgcatccaaagccagagggaaccacaatgactagtaaaacggtggtctcaatgcccacttagcctctgcctctgaatttgaccatagtggcgttcagctgatagagcgggaagaagaaatatgcattttttatgaaaaaataaatatccaagagaagatgaaactaaatggagaaattgaaatacatctactggaagaaaagatccaattcctgaaaatgaagattgctgagaagcaaagacaaatttgtgtgacccagaaattactgccagccaagaggtccctggatgccgacctagctgtgctccaaattcaggtgggtgagtgatcacgggacacttcctcagaccatttatttttttctgcctttattagtttgtgggtgagttcttgcatgtaaaccaagccatactatttctgggacctataagaatccatccatcttgtttaaaaatacatttgaatgctactctaggatggaatctgtgcttcaggcatccaggctacacattgtctttttttcttatgaagcattttctgcttttcttggaatttgaagactcccaggacttatctctagctcagcttcctcatagctcaaaatttagtgatctagactctcactaccctcagcataattatgtcgttgctgcttgctggacagatcttgaggatgagccagcactcttacttttgatactctggcccccagagcaagagattgtctggagattgttgcttattagtagttgtcagttacatataacttgattctttattaaccactgtagttctatgatagcttagtaacctggcctttgacatggccttttttaaagtggaatagatccaaaaaactaaaacatgaaataacaaaataaataaaatgtgaatataaagttactttcttcacatgtgttacttggggtttattcttcatagaatttttttaaaaattaaaataaaaactgtgtagcctaaacttgttcccattgaccaatgtagcaggaacaaattctaacctataatatttttttttaaatgtcaggtttgcgtttggattttttttcctgataaaaagttaagacatttggtgaatgaaattttgtaaaagtataaaaattataaagaagaaaataaaattctactcccaagatataattgctattaaaattatcaaaaatctgggagacatcttgtcatttattttctaggtatacaagtaaatgtttttcattagctcatgccctagacagttttagatcccccttttttttaatcatgtgaaggggattcataggatttcatgggactagatgatagatctgctttcatattttatgccatttgaatgtgtatatgctgtatagataatagcctctttcagtttgcacaaatatgccaatgttctgattccaagtttgtttgtttttttaatttagccttgagttcttccactcatttcttcagtaagtgtagtcagattgagatcgattggctagaaagtccccctaaactcccacaggcctccccaggcttcctgtggctctgactcctgcttccaacaaggttcatttgagggatcacccatcagcctgcacacacagtgcctgtgccacttctgtgccatgtctgcaaaggcacggaactcaccccttcctcaggctacacctacacaagaccattcatgcgaggcctctgtggacagactttattaaagatgtggggcaatggtatgtggggttacattacagaaatgcaaagcacttcaatttgatatcagatatccatactcttcttgggggcactggagacgcttccctgagcactaataccttgtaccacacccttgcctagctcgatttcactggcttctctttcacctcccctctccctccacagcctcctcatcccagattgcccccaggaactccatgcttgcccccactccattttacagaagaatttgtctctctccagctttttcccaaaatgaagatttaggtccatctttgcccatcctaaactatcaagatgcagagcaacacaaaagatctttaaattcaataaaatctgcaacagaataatttcctctctattgtataagcatattctttgtgttcactgcaaatcaatacttccattcagtggataaaattgttcttagaaaaaaaattgtcattttattatataaaacctattatctagtatgaaatgtaaattcacttttacccaagaaggaaatattatgcatttcataacactacactccctgcctgatggtgaattttgatcattttgattgcacatgaactgagacatgcagactgtgttatcagttatctgctctaccggagtgaattctgattatctgctcagcatcaatcatgtgtacccttgaaggatatgatgtgaaatttctagcttcaggcaagccatttctgtgccctgttctgcagtgtcagatcccggtcatatcctgtcattttttacagccacagtgtcttggggtttgttttttttttaagtcttctcccttttttgcatcattttcagaattctcttaaggtttgcatttttttcggtcgtccataacagtttttaattgtccaacaatctaatccaaggattatcatgagtctgttctcctggttcctataatgatagctcaattttaggaagttatatgaactattttgggacacaaggacactattttacatagacagagtaaacagtttttcctcaaatgccaagggaaaactaaaattgagacatccctttataagcaagcactatatttttgtttcttatttagtttcctaattaagaaaagggaacattaagtattgttaataataaatacaacaaatgcttgattacatatgtatgtacacttcaattctatattaaggacatttaagggatgtagatacaggaaaaagaaaaatgttaaattatttgtcagcatttgtaattatttttgtagggaggaggagcataaattaaattttaaaaatgctacctgtatcagtcttagacatgttgtaaaataccatcaatatattatctcatatgatggatcaaccccatggcactgagccttttcttcccatttgacaagtgaggaaactaaggtttagagaagataaatgatttacctgagattacacaggtattcagtaggaaaactgaaaataatgcttgttggttgtcaccatgctccgtatctctctccctataaaacaaaaactaagtgtggctaccattcctatttaggagtagccatgtttcttcattcaccaccaaaatctcattgattcaacaaatagagttgatacatatgacactatattagggatttagcagaaaaaatacaaatagcccaagctgttcctcacagagtgtacattaggtagattcaataattaagaatgtttttctctttctttgggaagccattaaacctattgccagccaagtgttttgaaatgaagtccagtgtgttgtatgtgagttaccctggtctctgtaacaacctgcaatgaagaggtgaaggctgtgtgttagttcatttgcattgctgtaaaggaatacctgaggctggataacataaagaaaagaggtttattttagctcatggttctgcaggctgtgtaggaagcatgtgccagcatctgcatctggtgagggcctcaggaggcttccaatcatggtggaaagcaaagggggagcaggcacattgcatggcgagagaggaagcaagagaaagaagcagaggagccaggctgtttttaaacaaccagatgtcacttgaattcatagattgagaactcactcattattgcaaggacagtaccaagccattcatgaaggccccatcctgcccccatgacccaaacacctctcacccagccccaccaccaacgttggggattatattcattcaacatgagatttggagggggacacatcgaaaccatatcaggctgtatacttggagccctgcaaccacacagcatcccatgaacatgacccaaaatgggaagcaatcaagggccgcttgtgaaaccagctttttctatgacccagaaggcactgcctcacctcatatgatcgaattatagacatcatcgtcgcagtaccataaatgagcagaaacgtcacttaaccaggtcccagctgatggggtgttaagaaaacagagttctcttctacccttgtctgggttggtcctactaaaaaactctcaagaccctaggcaatgtgattttcagattaactgagctagagcgttcattttaaagttaatgtttttttcttaatagttttcacagtgtacagacagaattaaagacctggagaaacagttcgtaaagcctgatggtgagaatagagctcgcttccttccagggaaagatctgaccgaaaaagaaatgatccaaaaattagacaaggtaaacattattgcttaaaattgcatctgttagctcctcgttgatgtagtttcacagatacctatggtactgtttcatgttatgctgacagacctatccttcattattctagtcactaatatagtccttttgttgtaatctagtcatacattctaagcttgatttagacacttgccaaaagaagttccaatccagtggtttcgagattccaaaggcacatttctctcatgacccaaaggagtaattttggcatcttaaatggattaatttgtcttcctgatgggagcacatcagaagaatggtgatgtggatgttagatagagctgagggggccatactcgaactcccagaggtatctgcaggggctggggcagggaaagtcttaacccagctctaaacactttccagaggtattttgtggggggtagggggagatactgctctaattaggaaataagattttgtcttagatgactttttttttattcctcttgaaccaattttcaaacatagctggaactacaactggccaagaaggaggagaagctgctggagaaggatttcatctatgagcaggtctccaggctcacagacaggctctgcagcaaaactcagggctgcaagcaggacacactgctcttagccaagaaggtaggcctgagaccctgccttttcccttctgcccctgctcctttattaccttttattttccacagaccgacagatttattgagagaagcactggagagattaggctttatgactaggggaacttagaaaaacgaaaggatgactcagagaattgtccaaaatgtttcaatcttattccctgaattaattcacttcacggtggcaaaacctaggcttttaaatgacactatacaagtttcacttaccaaggcaactacccaaatatgacagttattatctttgtatttcatgcacaaagttaaatcctttttagttccttttaagtggagcgcctcacttatccagtgatcttagtagggactgctccaatccagaactcagccagaacccagaaattgaaagggactgataaagagaaatgcagtcacacaacacccagaccaactgcaccatggaggtgcccaccaggcaccactagtgaggaaaggccaggaatacagaaccccctaatttaataagcgtaagagaccaggacagcagatccagagcctcagggtcagggtgggactgctagaagctgcactgaaaggagcagccagcagagcccctagaagtccccctggactcccagcatgttgcatgctagttaccctggtctctgtaacaacctgcaatgaagaggtgaaggctgtctattagttcgtttgcattgctgtaaaggaatacctgaggctgggtaactgataaagaaaagaggtttattttggctcatggttctgcaggctgtgcaggaagcatggtgcctgcaggtcttgccaggcttcctgtggctctgactcctgcttccaacaaaggttcatttggggaattgccccatcagcctgtacacccatttctgggtcatgtccgtgcaggcacgggactcactccttcctcagtctacccctacacaagaccattcatgcgaggcctttcatgcataccatagagccatcagaggactggccactcacctggcctctgggttccctggagcatcccgtcaatgcagagagttcagccagtcaacagtaattactgaacacctgctatgtgctactctcatgctaggcatgagttcagaaacaaagaggaagggacacattgtttacaccataggaagctcatagggtctagtagggggagacagatgaaaacagataatggtaatacccacaccagagactgtgggctcctgagggcagcagctgttcctcgttcttaatttctccaatgcctagcatgtgccagactctagaaaaacacttcaaggatgagtaatcatcagttctgttctagaagcacatgtggaacactaaacaagaaatgattgtaaatattagactatctttgccatttttatttgactattatgcttctgctctgatgacttccatgactagactgatcaggccagtggcaggtgtgcaaatcacaacttggcctcccaaactaaggtacaaagttgtgagtcacacgtctgccactggactgatgcgaaggctcagttaagctcatgcactttgcctgaattagcatgtctgatatttctttaaataaacgttgccttccttccttttgcaaaatgaatttccctttctttgggggaagtcatttttcactgaggcctgacttatcaaagctgatggcagagtcgcctggaaggcaacagtaatgctaaagaaatgtacatagcggccgcttcccatagccaggaaagctccagcacagccgagtcctagtctaacaattattctcccctttcctttccctaccttccatgctctccattggcttcttcctcctccccagctttcactgtccccactccatttaaaatgataatctcatagtaggcagaactggaaagtagaaagacattcagattccagatctatgatttatcaaaagtagaaaatgaccttgagaaagatggataaatgatcttaaaactcagtttgctcatctgtgtaatgggtgtgatagccaaagttgttgcaagtattacatagtcgaacacgtaagtgacctagccacattcaaaaagattgcacatctcctcaagtgtctcacttctcctagatagcttatggcgcctcctgcaaatttcccaacagaaatgggagcagaaagtgggaaatctcagttaagacttggagcaacccaggataatatgaaactttgttttctaatttatggaagagaagggaagttggccagttacacagatggacacacacactcgagtgtgtagtggttgccatcccattactgggtatatacccaaaggattataaatcatgctgctataaagacacatgcacacgtatgtttattgccacactattcacaatagcaaagacttggaaccaacccaaatgtccatcaatgatagactggattaagcaaatgtggtacatatacaccatggaatactatgcagccaaaaaaaggatgagttcatgtcctttgtagggacatggatgaagctggaaaccatcattctcagcaaactatcacaaggacaaaaaaccaaacactgcatgttctcactcatagatgggaactgaacaatgagaacacatggacacatgaaggggaacaccggggcctgtcatggggtggggggagggatagcattaggagatatacctaatgtaaatgatgagttaatgggtgcagcacaccaacatggcacatgtatacatatgtaacaaatctgcacgttgtgcacatgtaccctagaacttaaagtataattttaaaaaacagatgagaaaaaagaagaaaaaaaaagtgtgccgtggttgagtggaaaatgactccccccaaagataaggaaattcatttaaaaaaggaaaggcagcaacatttaaagaaacataagacatgctaatttactcaaagtgcattagcttatctaagtcttagcatttcttattttatgagttaaaagttgtgaattgcaccaatgctgctggactgttcagtctgttagtggaagttgtcaaagcagaagcctagaagtcaaataaaaatggcaaaacttatgactcactgaagtttttagtggtagtcatttttatttgatacatgctgcttaaaaattagttcagtatagaagagtcataaaaatgtatattacctaccattaaggaggcaaaatttgtgtataataatcagttattacattttcagaggcaggtaaatcactagcagcaacatttttctaaacagaggtacagatgtgaccagatatgctctgttaggagaggaaggtattcagcattagtgtagtatttggaagctcatttgcatgtcccaatttatcctggtccaagaacaaagaatgaaacaaactaagagttcattcattccttcattcagaaaatattgaactttaatttgggggggtgcctcttatattccaagcactgtcctgagcactgggactatgatgatgaataaaacaaaaagtccttgtcctcatgaagagtacattcttatgggatgacaaaaatagtgaaatacatatataatatcagcagtgagacatgatgtgaacaaaaaataaggcaaggtaagaggaactaatgagtgttgccaggtagaaggtatcaccactgaactgctccactatggctatcagactaaaagagtctaccatttataagacagcttacaggaacccctaattccagttttacttctttcctgactcttgagatcttttttttccagttagtcttatcttttaactgtgttaatgctaaatagctgatattaataggttaaaaaaaaaaaaagtctggtcgcagtggctcatgcctgtaatcccagcactttgggaggccatggcgggtagattgcgtgagctcaggagttcaagacctgcctaggcaacatggtgagactccatctctacaaaaaatacaaaaacaaatagccgggtgtgatggtgcacacctgtggtcccagctacttgggaggctgaggtgggaggatcacttgagcctcaggggcagaggttgcagtgagctgagatcacaccactgtgctccagcctgagtgacagagtgagaccctgtctcaaaacaaacgaacaaaacaaaacactccaggaacagctctcattctaaattattgactaaatattccccagctcagctcatgcatgtttctgacctagtaatgatgcacaccaggaattatgatcaataatgccaacatgtcaatgtgatggttttcatttaaaaagtcatttcagatgcagaacttctgctgattatcttatataagcaaagagtaacgttaattctaccagattttttcccctggataagtgacaaactaataacgtcaaattaaactagaatttaggcatcaagaacactcttggctgggcacagtggatcatgcctgtaatcccagcactttgggaggccgaggcaggaagactgcttgagcccaggagttcaaaactagccttgtcaacacagcaagtccccatcgctacaaaaataataaattagccaactatggtggtgcatggctatagtcctatctacttaggaggctgaggcaggagaattgcttgagccccggagttccaggctgcagtaagctatgatcacactactatataccagtgtgagcaacagaacaagaccttgtctttattttaatttttttttttttttttttaaagaacatccctggccaggcgcggtggctcacgcctgtaatcccagcacttagggaggctgaggcaggcggatcacgaggtcaggagatcaagaccatcctggctaacacggtgaaaccccagcgctaataaaaatacaaaaaaaattagccgggtatggtgttgggcacttgtagtcccagctactcgggaggctgaggcaggagaatggcgtgaacctgggaggcggagcttgcaatgagctgagattgcgctactgcactccagccagggcgacagagcgagactcagtctcaaaaaaaaaaaaaaaaaaagaacatcccttcacctctccttcttacctcttaaaaatgggcactaaactgttctcctcaatgttattcaccttgaaatccagtaactagataaacaaatccttttcttgttctctccttgtccttacttacacagccagggtgttcggctcaatatctgcagtctcttccagttcttaatttctgtgaattccaagttagaccctccttccttcagacaaaaatgcaccccgccattatagacagccagcagcctgccattttaagtctttgtggactgtatacatagactaagctttgggctctttaattctagatgaatggctatcaaagaaggatcaaaaatgcaactgagaaaatgatggctcttgttgctgagctgtccatgaaacaagccctaaccattgaactccaaaaggaagtcagggagaaagaagacttcatcttcacttgcaattccaggatagaaaaaggtctgccactcaataaggaaattgagaaagaatggttgaaagtccttcgagatgaagaaatgcacgccttggccatcgctgaaaagtctcaggtaggctttggctcctgtattgcatttctaaagggtgccagcaggggttgcattcaggcaacccacagttatcccacagtataagaaaaatttccccactctaccacacacagtcccaacagtcgttagaagtgtatttaagatattctatgataagtcaaagtgcagtaatccagagtgctacaatactcactgaagaacacttagcaagcacagggcccaccccatagccttacatcctgggctgctgaggctgaacatcatggccttccaccagcatagcaatgaccaggctggcactggccttgtccataagtctccaatctctgtcttggcacctctgctcagaccacatctgactgttccatgttcatctcctgtggcctccacagcatacagtgaggcctccacccacattttaggtgccatgccttctgcagatgcttgatgtacatcataggccccagcgccacccctttcttttcccaccttaggcctctggcctaagactaggtctattgctgactccccctgcaagttagatagcagatcttctgtctacccccatgacctgtcagtattcttagactggaattaggcatctctttccaaggagtctacatcctccagatgtacaactcactcagattgccaagtgggtatcaccgaaagggtccctatttgctcctgaactcaagacaaaactgcattcagaacacactaggaatacctgagcacaagtgtaaattacgtgatttataatttccacaccacctgggactgttcctttcagggcattcagattttacctgtggtgtcccactgccatttattagagggcttttcagtgcagtaagtgattactctattttccagaggcacagacaaaatcttgaaaacgttgaggctcagggcaaagctggtgaccattttcctcctctggttccactttactcctctacctcttccattgtaacttttgctcaccaatgacttaccaaaggaaatatgttgctctgcctttgtcaaaaacagggaaataattagtgcttgatgacagatattgaggtggaaacatagttaagacccacaaagcagtctttgaaaaacactaaactccaggattaatgtgatgcttaagcaatacagcccattccaatgaggtgtgggggtgtgtgtgtgtggtgtgattccaccctcctaccctaaaccccaggaataatgtgatgctgaagcaatacagcccatgccaatgagaggtaggtgtgtgtgtgtgtgtgtgtgtgtgtgtgtgtgtgtgtgtggtgtgattctaccctcctacccctcccatccctttggggagtatcagctagcacggtcaaagactgtccagaccagctgtgtcttttgggacctaaggataaagtgacttcaccagagttttcagagaactgaaaaggaaaaatcattctttgcaggagttcttggaagcagataatcgccagctgcccaatggtgtttacacaactgcagagcagcgtccgaatgcctacatcccagaagcagatgccactcttcctttgccaaaaccttatggtgctttggctccttttaaacccagtgaacctggagccaatatgaggcacataaggaaacctgttataaagccagttgaaatctgaatatgtgaacaaatccaggcctctcaaggaaaagacttcaaccaggcttccttgtacccacaggtgaaaaatgtgagcataatacttctaatattattgataagtaaggtaaccacaattagtcagcaacagagtacaacagggtttctatttacccaccaactactatacctttcatgacgttgaatgggacatagaactgtcctacatttatgtcaaagtatatatttgaatcgcttatattttctttttcactctttatattgagtacattccagaaatttgtagtaggcaaggtgctataaaaatgcactaaaaataaatctgttctcaatgaagtacggaaatggacacagtggtctttgtttattaaagaaaaaacaaatactgttcaatatacacactttaaaaagaaagaatggctatttgaaaaggaaaatacctcaagtattgcaaaggcataactcactttgttgaataagaagtagcacttaatcttggtaaatctaaattacataaagtagtgaagcttgtcatggctttttgcatttttttcattttatttttttgacaaataataattgtacctactcatggggtacatactgaagtttcaatacatataatgtatagtgatcagatcagggtaattagcatatacattcaaactttatcatttcattgtgttgggaatattcaatatcctcctagctatttgaaactgtatattgttacctatagtcatcctacagtggtataggacataggacttattccacctatttcactgtaattttgtgtctattaacaaatctaccccattccttcctttcctcatcctttcccttaaccttcccagcctcttatatccgctgttctacttttagcttccacatgagtgagaacaatttttagcttccacacatgagtgagaacatgtggtgtttaactttctgtacctggcttatttcaatgaacataacatcctccagttcctttcatgttgccacaaatgacaggattttgttcttttttgtggctaaataatattccgttgtgtatgtgcatatgtatgtgcatatgtgtgtgtgtgtgtgtagctcccattttctttatccacttatctgttgttggacagacacctaggctgatttcatgtcttgcctattgtgaatagcactgcagtaaacatgggggtgcagatgtctcttcaatattctgatttcctttcctctggataaatttccagtagggagattgttggatcatatgttcgttctatttgtagttttctgaggaacttccatatcattcttcatagtgactgcactagtttacattctcaccaacagtgtatataagagctcccttttctctgcatccttaccagcatttgttattttttaactttttggtaatagctattgtaattggggtgggatgatacctcatcatgtttttttaattgctatttccctgatgattagtgatgttgagcatttcttcatatacctgttggccatttgtatgtcttttgagaaatgtctgttcagatcatttgcccatttttaagtcagattgttgtttttgtagtgttttttgatgttaagatatttgagtcccttatttattctgaatatgaatcccctattggatgagtagtgtgcaactattttctttgattctgtaggttgtcttcactctgttgtttcctttgctgtgcagaaggtttttagtttgatgtaatctcatttgtttatttttgcttttgttgcctgtgttttgaggtcttattcataaaatattttctcaggccaatgtcctgaagcatttctcctatgttttcttccagtagttttatggtttggggtgctatatttaggtctttgatcattttgagttgatttttaaatagggtgagtagtagggaactagtttcattcttctgcatatggacctccagtttccccaacaccatttattgtagagactgtccttttcccaataagtattcttggaacctttgtcaaaaatcagttgtctatagatatatggatgaatttcttgattctctattttgttccattggtctatgtatctgtttttatcccagtgtcatgctgttttggttactagagctttgtagtatatttaagatgtggtagtgtgatacctccagctttgttcattttgttcaggattgctttggctatttggggtcttttgtggttacatacaaattttaagattgttttttcctatttttctgaagaatgccattagtattttgatagtgactacaatcaatctgttgattgctttgggtagtattgtcattttgttttgttttatctattttattttattttattttatttattttgggagacagagtctcactctatcacccaggctggagtgcagtgacatgatctcagctcactgcagcctccacctccagggctcaagtgatcctcccacctcagcctcctgagtagctgggactacaggtacacaccaccacacccagctaatatttttattttttgtagagatggagtctcactaggtgacctaggctgctctcaaactcctggcctcacgcaatcctcctgcctcagcctccaaaaagtgctaggattataagtatgagccaccacatccagccagaatggctattattaaaaagtcacacacacaataaagatgttggtaaggttgcaggaaaaagggaatgcttaacactgctggtgggaatgtaaaattagttcaaccactttggaaagaactaaaaacagaactaccatttaacccagcaatcccattactgggtatatacccaaggaaaataaattgttctaccaaaaggacatgtgcacttgtacattcatcaaagcactattcacaatagcaaagacatggaatcaacctagatgcccattaacactggactggataaagaaaatgtgatacatatacaccatggaatacagccataaaaaggaacaaaatcacattctttgcagcaacatggatgcagttggaggccactgacctaagcaagtctgaagcagaaaaccaaatactacatgttctcacttaaatgggggagctaaacaatgagtacacatggatataaagatggaaacgacagactattggggagaaggtggggggagagttgaaaaactatctgttgggtactatgcccactacctggatgatgggatcatttgtacctcaaacttcagcattacatgatttacccatgtaagaaaaaatcttctttaaaggttcagtagaattcagcaatgatgccatctggatttttctttgttggaagactattttattttatatattttattttattaatttattgttttgagacagagtctcgctctgtcacccagactgtagtgcagtggccaaatcttggcttactgtaacctctgcctcccaggttcaagtgattctcctgcctcagcctcccaagtagctgggattataagcatgcactaccatgcctggctaatttttggaatttttagtagagatggggttttgccaggctggtctcaaactcctggccctgagtgatccacctgccttggcctcccaaggtgctgggattacaggtgtggaagacgttttattactcatttaatctaattgcttggtattgatctgttcaggttttctatttcttcccaattcaaccttggtagattgtatatgtcaaggagtttattcacttcctctaggttttctaacttgacatatagtacaaagcaccctggaattattttttgtatctgttgtgacatacccttttttgcttctgatttcatttatttgggtcttctctcttttttccttagtctagctaatggtttgttgaatgtgtttattctttcagaaaaccaactttttgttttgttgatcttttgtatttttttactctcaatttcatttatttctgctctaatctttattatttctctcttcctacaattttgactttgatttgttcttgattttctagttgcttgaggtatatcattaggttatttgaaatctttctagttttttcatgttaagtatttgttgctataaacttgcttctcactactgcttttgctgtgtcccatacgttttggcatgttgtgtttccattttcgtttgttccaaagaatttttaaatttcttccttaatttctttcttcttcattttggtcattcaggagcatgttgtttaatttccatgtatttgtatagtttcaaatgttctcattatttatgtctagttttattccattatggtcagatatttgatatgattttgatttaaaaaataaatttggatgccaggcaaggtggctcacacctataatcccagcactttgggaggccgaggcaggcggatcacttgaggtcaggagtttgagacaagcctggccaacatggtgaaacccggtctctactaaaaatatgaaaattagctggccatggtggcgcatgcctgtagtttcagctacttgggaggttgaggcaggagaatggcttgaacccaggtgacagaggttgcagtgagccaagatcgcaccgttgcacttcagcctgggcaacagagtgagactccatctcaaaaaagtgtcttcatctcaaaaaaagtctctttttgagacttgttttatttctaacctatggtcagtcctgaagaatgtttcatgtgctgatgaaaagaatgtgtatcctgtatttcacctgttgggtgaaatgttctgtaaatgtctgttaggtccatttggtccatgatatggtttaaatccagtttttctttgttgattttctatatagattatctgttcagcactgagaatgaggtgttgaaatctccaactattattgtattggggtctatcactccttttagctcttaatattttctttatatatctgagtgctctggtggtgggtgcatatatatttataattgttctattgctgaattgatccctttattagtatataatggtcttctctgtctctttttacagcttttgacttgaagtttgtcttgtctcatataagtatagctactcctgctcacttttggttttcatgtgcttgaaatatctttttctatcccttcactttcagtctatgtgtgtctttacaagtgaggtgagtttcttgtaggcagcatatagttaggtgttggtttgctttaatccaattagccacttgatatattttatttttttaattataagtttatttaatttttccgtaagttattggggtacaaatggtatttggttacaggaataagttctttagtggtgatttgtgagatcctggtgcacccatcatccaagcagtatacactgcaccatatatgttttcttttatccctcgccccctcccactcttccccccaagtcacctaagtccattgtatcattcttatgcctttgcgtcctcatagcttagttcccacacatcattgagaacatatgatgtttgggtttccattcctgagttactttacttagaataatagtctccagtctcatctaggtcattgcaaatgctattaattcattcccttttatggctgagtagtattccatttgtgtgtgtgtgtatgtgtgtgtgtgtgtgtgtatagatagatatatagatatagatcacagtttctttatccactcattgattgatgggcatttgggttagttccattattttgccattgtgaattatgctgctataaacatgcatgtgcaagtatctttttcgaataatgactttgtttcctctacgtagatacccagaagtgggattgttggatcaaatggtagttctacttttagttctttaaggaatctccacactgttttccatagtggttgtactagtttacattcccaccagcagtgtaggtgggattccctgatcgccaaatccatgccagcatctactgcttttttatttttttgattatggccattctttcaggagtaaggtggtatcacattgtggttttgatttggatttccctgatcattagtgatgctgagcattttttcatatgtttgttggccatttgtatatcttcttttgagaattgtctgtttgtggccttagcccgctttttgatgggattgtttttttcttactgatttttttgattttgttgtagattctggttattagtcctttgtcagatgtatagattgtgaagattttctcccactctgtgggttgtctgtttactctgctgactgttccttttgcatgcaaaagctctttagtttaattaggtcccagctatttatctttgtttttattgcatttttcttttggggttttggtcatgaaatccttgcctaagccaatgtctagaagggtttttccaatgttatgttttagaatttttatagtttcaggtcttaggtttaagtccttaacccaccttgagttgatttttgtaaaaggtgagaaatgaggatccacttttattctcctacatgtggctagccaattatcccagcaccatttgttgaaaagggtgccctttcctcactttatgtttttgtttgctttgtcaaagatcagttggctgtaagtatttgggtttatttctgtgttctctgttctgttctattggtctatgtgcctatttttatgccagtaccatggtgttttggtgactatggccttagagtatagtttgaaatcaggttatatgatgccttcagatttgcactttttgcttagtcttgctttggctatgcgggctcttttttggttccatgtgaattttagaattgttttttctaactctgtgaagaatgatggtggttttttgatggggattgcattgaatttgtggattgcttttggcagtatggtcattttcacaatattgattctacccatccatgagcatgggatttgtttccatttgtattgtctatgatttctttcagcagtgctttgtagttttccttgtagaggtctttcaactcctttgttaggtatattcctaagttttttttttttttgcagctattataaaagggattgagttctcaatttgattctcagcttggttgctgttggtgtatagaagagctactgatttgtggacattaatcttgtatctggaaactttgctgaattattttatcagttctaggagatttctggaggagtctttagggttttcaaggtaaacaatcatattgttagcaaacactgacagtatgacttcctctttaccaatttggataccctttatttcttttgtctgattgctctggctaggacttccagtactatgttgaagaggagtggtgagagtgggcattcttgtcttgttccagttctcagagggaatgctttcaacttttccccattcagtattatgttggctgtgggtttgtcatagatggcttttattacattaaggtacgtcccttgtatgccgattttgctaaggattttaatcataaagcgatgctggattttgtcaaatgcttttctgcacctgttgagatgatcgtgtaatattttttttaattctgtttatgtggtatatcacatttcctggcttgcatatgttaaaccatccctgcaaccctcgtatgaaacctacttgattatggtggattttctttttgatatcttgtggatttggttagccagtattttgttaaggattttagcatctacgttcatcaaggatatcggtctgtagttttttttttttttttttggttgtgtcctttcctggttttggtattagggtgatgctggcttcatagaatgaattagggagagttctttctttctctatcctatggaatagtgtcaaaaggattggtaccaattcttctctgaatgtctggtagaattctgctgtgaatccatctggtactggacttttttgtgtgggtaattttttttttgacagagtttcactctgttgcccaggctggagtgcagtggcgtgatctcagctcactgcaacttccgcctcctgggttcaagcagctctcctgcctgagcttccagagtagctgggactacaggcatgtgccaccacactctgttaatttttgtatatttagtagagacagggttttgccacattggccaggctggtctcgaactcctgacctcaagtgatccacccgcctcggcctcccaaagcgctgggtttacaggcatgagccaccatgcccggccttttgttggtaattttttaattaccgtttccatctcgctggttgttattggtctgttcagggtgtctaattcttcctgatttaagctaagaaggttgtatttttccaagagtttatccatctcttctatgttttctagtttatgtgcgtaaaggtgttcttattagccttgaatgatcttttgtatttcagtggcgtcagttgtaatatctcctgtttcgtttctctgtgtgaggttatttggattttctctcttcttttcttggttaatcttgctaatggcctatcaattttatttaccttttcaaagaaacagctttttgtttcatttatcttttgtatttttgtttgtttcaattttatttagttctgctctgatctttgttatttcctttcttctgctgggtttgggtttggcttgttcttgtttctctagatctttgaggtgtgaacttagattgtctgtgctctttcggactttttgatgtaggcatttagggccatgaactttcctcttactacatgttaagtgtatcccagaggctttgataggttgtgtcatttattgtcattcagttcgaagaattttttattttccatcttgatttcgtttttgacccaatgctcattcaggagcaggttatttaatttccatgtatttgcatggttttgaaggatccttttggaattgatttccagttttattccactgtggtctaagagaatgcttgatataacttcaattttcttacatttattgagcctcgttttatggcctatcatatggtctgtcttggagaaagttccaggcactattgaatagaatgtgtattctgtggctgttagatgaaatgttctgtatatatctgttaagtccatttgttccagggtatagttaaaatcctttgtttctttgttgactttctgtcttgatgacataagtgctgtcagtggagtactcaaagtcccccactattacagtgtttttgtctatctcatttcttaggcctattagtaattgttttataaatttgggagctccagtattaggtgcatatatgtttaggaagtggagcatttaggccatttacattcaatgttagtattgaaatgtgaggtaccattgcattcatcatgctctttgttgcctgtgtacttttgggacttttttgttttgttttttaactcgtatttttgttttataggtcttgtgtgatttatgctttaatgagattctgttctgatgtgtttccaggatttgtttcaagatttagagctccttttagcagttcttgtagtggtggcttggtaatggcgaatttgatcagcatttgtttgtcagaaaatgtctttccttcatatatgatgcttaggtttgctggataccaaattcttggctgatacttgttttgcttgaggaggttgaagataaagacccccaatcccttctagcctgtggggtttctgctgagaagtctgctgttaaatctgataggttttcctttctaggttacctggtgcttctctctcactgtagcatgacgagccatagacaaaacctctcagacaccaagttgtagaaagaagggctttattcagctgggagcatcggcaagctactgccttaaaatccgagctccctgaatgcacaatttctgtcccttttaagggctcacaacactaaagatttcacatgaaagggtcgtgattgatttgagcaagcagatggtacgtgacaggggctgcatgcaccggtggtcagagagaaacagaacagggcagggagtttcacagtgttcttctatacaatgtctggaatctatgaataacatcggtttctaagttatgagttgatttttaactactgggtttaggccaggcaggcccgggcctggttttgggcctggcgccggactgcctgtctttggttttactcccttgttgttttttcttaaaacaggtactgagtataaaacaatataaaacaatatgagagggtctctctcttccctcatcacagctcttaagattctttcctttgtcttaactttggataacctgatgacaatgtgcctaggcaaagatctttttgcg

SEQ ID NO: 946 - DNA, 2988 bp, Homo sapiens
ttacatgctatgggaaaacttcctggaaccagaatggcagcgttaaaagccaagtataccttgctgcatgacgccgtgatgagcacacaagagtcagaggtccaactgctacagaatgccaaacgtttcactgagcaaatacaacagcagcagtttcacctgcagcaagctgataattttccagaagcattctccacggaggtctccaaaatgagagaacaacttctcaagtatcaaaatgaatataatgcagtgaaggaaagagagttccataatcagtacagattaaatagaacttgattttttttttttgcagcttaaaggaagaaaaaatcatcatagtaaaagaatttgagaagataacaaagccaggagaaatggagaagaagatgaaaatattgagagaaagcactgaagaattacgtaaagaaataatgcagaagaaattagaaattaaaaatttacgagaagatttggcatctaaacaaaagcagttattaaaagagcagaaggaactagaagaattgttgggacatcaggtcgtcctaaaggatgaagtggcccaccatcaaaccattccagtacaaattggaaaagagatagaaaaaataacacgcaaaaaagtagaaatggaaaagaaaaaaattgtcttggaacaagaagtcaaaacgctaaatgactccctaaagaaagttgaaaacaaggttagtgctatagtggatgagaaggaaaatgtaataaaggaagttgaaggcaaacgagccttacttgaaatcaaagaacgagaacataaccaattggtcaagctattggaattagccagagagaatgaagcaacttcattaactgaaagagggatcttggatctcaatttacgcaacagtctcattgacaagcagaactaccatgatgaactttctcgtaagcaaagagagaaagaacgagattttcgaaatttaagaaagatggaactgctcttgaaagtgtcctgggatgcacttaggcaaactcaagcactgcatcaaaggcttctattagagaaaattatatcagaaatggagtctaagttagtagaacaacaacttgcagaagaaaacaagcttttaaaggagcaagaaaacatgaaagagctagtagtcaaccttctccgcatgactcaaatcaaaattgatgaaaaggaacaaaagtccaaggatttcctgaaagctcagcaaaaatacaccaacattgttaaagaaatgaaagcaaaggatcttgaaatcaggatacacaagaagaaaaaatgtgaaatttatcggagactgagagagtttgctaaactgtatgacaccattcgaaatgaaagaaacaaatttgttaacttactccacaaagctcatcagaaagtaaatgaaataaaagaaaggcataaaatgtcattaaatgaacttgaaattctgagaaatagtgccgttagtcaagaaagaaagctacaaaattccatgctgaaacacgccaacaatgttaccatcagagagagcatgcaaaacgatgtgcgcaaaattgtatcaaaacttcaggaaatgaaagaaaagaaggaagcccagttaaataacattgacagacttgccaacacgatcacaatgatcgaagaggagatggtgcagcttcgcaaaagatacgaaaaagctgttcagcatcgaaatgaaagtggcgttcagctgatagagcgggaagaagaaatatgcattttttatgaaaaaataaatatccaagagaagatgaaactaaatggagaaattgaaatacatctactggaagaaaagatccaattcctgaaaatgaagattgctgagaagcaaagacaaatttgtgtgacccagaaattactgccagccaagaggtccctggatgccgacctagctgtgctccaaattcagttttcacagtgtacagacagaattaaagacctggagaaacagttcgtaaagcctgatggtgagaatagagctcgcttccttccagggaaagatctgaccgaaaaagaaatgatccaaaaattagacaagctggaactacaactggccaagaaggaggagaagctgctggagaaggatttcatctatgagcaggtctccaggctcacagacaggctctgcagcaaaactcagggctgcaagcaggacacactgctcttagccaagaagatgaatggctatcaaagaaggatcaaaaatgcaactgagaaaatgatggctcttgttgctgagctgtccatgaaacaagccctaaccattgaactccaaaaggaagtcagggagaaagaagacttcatcttcacttgcaattccaggatagaaaaaggtctgccactcaataaggaaattgagaaagaatggttgaaagtccttcgagatgaagaaatgcacgccttggccatcgctgaaaagtctcaggagttcttggaagcagataatcgccagctgcccaatggtgtttacacaactgcagagcagcgtccgaatgcctacatcccagaagcagatgccactcttcctttgccaaaaccttatggtgctttggctccttttaaacccagtgaacctggagccaatatgaggcacataaggaaacctgttataaagccagttgaaatctgaatatgtgaacaaatccaggcctctcaaggaaaagacttcaaccaggcttccttgtacccacaggtgaaaaatgtgagcataatacttctaatattattgataagtaaggtaaccacaattagtcagcaacagagtacaacagggtttctatttacccaccaactactatacctttcatgacgttgaatgggacatagaactgtcctacatttatgtcaaagtatatatttgaatcgcttatattttctttttcactctttatattgagtacattccagaaatttgtagtaggcaaggtgctataaaaatgcactaaaaataaatctgttctcaatgaagtacggaaatg

SEQ ID NO: 947 - protein, 749 aa, Homo sapiens
MEKKMKILRESTEELRKEIMQKKLEIKNLREDLASKQKQLLKEQKELEELLGHQVVLKDEVAHHQTIPVQIGKEIEKITRKKVEMEKKKIVLEQEVKTLNDSLKKVENKVSAIVDEKENVIKEVEGKRALLEIKEREHNQLVKLLELARENEATSLTERGILDLNLRNSLIDKQNYHDELSRKQREKERDFRNLRKMELLLKVSWDALRQTQALHQRLLLEKIISEMESKLVEQQLAEENKLLKEQENMKELVVNLLRMTQIKIDEKEQKSKDFLKAQQKYTNIVKEMKAKDLEIRIHKKKKCEIYRRLREFAKLYDTIRNERNKFVNLLHKAHQKVNEIKERHKMSLNELEILRNSAVSQERKLQNSMLKHANNVTIRESMQNDVRKIVSKLQEMKEKKEAQLNNIDRLANTITMIEEEMVQLRKRYEKAVQHRNESGVQLIEREEEICIFYEKINIQEKMKLNGEIEIHLLEEKIQFLKMKIAEKQRQICVTQKLLPAKRSLDADLAVLQIQFSQCTDRIKDLEKQFVKPDGENRARFLPGKDLTEKEMIQKLDKLELQLAKKEEKLLEKDFIYEQVSRLTDRLCSKTQGCKQDTLLLAKKMNGYQRRIKNATEKMMALVAELSMKQALTIELQKEVREKEDFIFTCNSRIEKGLPLNKEIEKEWLKVLRDEEMHAIAEKSQEFLEADNRQLPNGVYTTAEQRPNAYIPEADATLPLPKPYGAPFKPSEPGANMRHIRKPVIKPVEI

SEQ ID NO: 948 - DNA, 23235 bp, Mus musculus
  misc_feature (1)...(23235): n = A,T,C or G
nnnnnnnnnnnnnnnnnnnnnnnnnnnnnnnnnnnnnnnnnnnnnnnnnnnnnnnnnnnnnnnnnnnnnnnnnnnnnnnnnnnnnnnnnnnnnnnnnnnnnnnnnnnnnnnnnnnnnnnnnnnnnnnnnnnnnnnnnnnnnnnnnnnnnnnnnnnnnnnnnnnnnnnnnnnnnnnnnnnnnnnnnnnnnnnnnnnnnnnnnnnnnnnnnnnnnnnnnnnnnnnnnnnnnnnnnnnnnnnnnnnnnnnnnnnnnnnnnnnnnnnnnnnnnnnnnnnnnnnnnnnnnnnnnnnnnnnnnnnnnnnnnnnnnnnnnnnnnnnnnnnnnnnnnnnnnnnnnnnnnnnnnnnnnnnnnnnnnnnnnnnnnnnnnnnnnnnnnnnnnnnnnnnnnnnnnnnnnnnnnnnnnnnnnnnnnnnnnnnnnnnnnnnnnnnnnnnnnnnnnnnnnnnnnnnnnnnnnnnnnnnnnnnnnnnnnnnnnnnnnnnnnnnnnnnnnnnnnnnnnnnnnnnnnnnnnnnnnnnnnnnnnnnnnnnnnnnnnnnnnnnnnnnnnnnnnnnnnnnnnnnnnnnnnnnnnnnnnnnnnnnnnnnnnnnnnnnnnnnnnnnnnnnnnnnnnnnnnnnnnnnnnnnnnnnnnnnnnnnnnnnnnnnnnnnnnnnnnnnnnnnnnnnnnnnnnnnnnnnnnnnnnnnnnnnnnnnnnnnnnnnnnnnnnnnnnnnnnnnnnnnnnnnnnnnnnnnnnnnnnnnnnnnnnnnnnnnnnnnnnnnnnnnnnnnnnnnnnnnnnnnnnnnnnnnnnnnnnnnnnnnnnnnnnnnnnnnnnnnnnnnnnnnnnnnnnnnnnnnnnnnnnnnnnnnnnnnnnnnnnnnnnnnnnnnnnnnnnnnnnnnnnnnnnnnnnnnnnnnnnnnnnnnnnnnnnnnnnnnnnnnnnnnnnnnnnnnnnnnnnnnnnnnnnnnnnnnnnnnnnnnnnnnnnnnnnnnnnnnnnnnnnnnnnnnnnnnnnnnnnnnnnnnnnnnnnnnnnnnnnnnnnnnnnnnnnnnnnnnnnnnnnnnnnnnnnnnnnnnnnnnnnnnnnnnnnnnnnnnnnnnnnnnnnnnnnnnnnnnnnnnnnnnnnnnnnnnnnnnnnnnnnnnnnnnnnnnnnnnnnnnnnnnnnnnnnnnnnnnnnnnnnnnnnnnnnnnnnnnnnnnnnnnnnnnnnnnnnnnnnnnnnnnnnnnnnnnnnnnnnnnnnnnnnnnnnnnnncccggatgtgtctttctctccttcttctagtcttttggctcgattaaaagctctcgaaatagtaagaaaagaggtctgggaacagctaaaagaaacctatgttgctggtgacacacaggtgcagcaccagtttgaagtaggagacacagtcctggtgaggagacaccgagcaggaaacctagagccgaggtggaagggaccctacttggtgctactgacaacgcccaccgcggtcaaagtggaagcaatccccacttgggtccacgcatcccatgtcaagagagcaccccctggagtcagccatgatgagtggactttggagaagactactaatccttttgagttgcgcctgcttcgtaggagcgatcccaaaggacttcaacccccacagtcctgttcaacaaacgtgggaggtactcaatgaggggggtagggctgtatggacaatcgccaaggtacaccctctgtggacttggtggcctgatcttttccctgacatctgtaagttggcaataggagcccctcctagatgggacttagaggggtactctgacattcagagggcacctttaacaccccctccgtacatagaaaaacattcgagagaaccatggggtggttgctctaactaaagggatagaagtatgcttcgaacccatcccttctacgtcttccccgggccccatcgaagtcagtccctcaatccaacatgtgtaggtaaggctgacttcttttgtaagagctggggttgcgagacttcaggtacagcccgctggaagccctcctcgagctgggactatattagagtagcagccaactattccctagcgtcttatgtacctggaggatttgacctagacgagtgtactgactggtgccatccgctccgtgtcaccttcactgaaccagggaagagagctctgggatggacaaaagggtatacctggggtcttaggatttacaaggaaagatatgatgggggattattgttcactctccgattaaaaatagagaccccctacaatcctttaggccccccaaccaagtccacacccctcacccatactattactcagcctactccagtgattgcggacccccttaatatggccgctatcacccaacctcccactcctcaggtacctctaactattacccctgcaattccttcaacaagacagaggatgtttaacctagtaagaggagccttttatgcccttaatagaactgatccaagcgctactgaggactgctggctatgcctgtccttgggtctgccttattatgaaggaattgccttctatggggatttcaacagaaccagcagccatacttcctgctcttggggaacaggacaaaaactgaccctgactgaagtatctgcgaggagtccaggtctctgtataggcacccctccttccacccacaaacacctatgcggacaaattcagtccgtgtccagaatggaagctaattactatcttgtaccttccccggttggatggtgggcttgcaatacaggacttactccctgtgtatcaactaaggtttttaattcatctcatgatttttgtgtcatgatccagctgttaccccgcatatattatcaccctgcatccagtttagaagaaagctatgctggccggcggtcaaaaagagaaccaattactttaaccctggctgcattcatgggaataggtatggcagtaggagtggggacgggagtgtcagctttgatagaaggaagacagggaattcagtctttgagggatgctgtcaatgaagacctagcggcaatagagaagtccattgacgctttagaaaaatctttgacctccctgtctgaggtagttttgcagaacaggagagatcttgattttgttgttcctaaaggaaggaggactgtgtgctgcccttaaagaagagtgctgcttctatgcagatcatacaggaatagttagagactctatgcagaaactgagagaaagattagagcgaaggaaacgggaacgggatgnnnnnnnnnnnnnnnnnnnnnnnnnnnnnnnnnnnnnnnnnnnnnnnnnnnnnnnnnnnnnnnnnnnnnnnnnnnnnnnnnnnnnnnnnnnnnnnnnnnnnnnnnnnnnnnnnnnnnnnnnnnnnnnnnnnnnnnnnnnnnnnnnnnnnnnnnnnnnnnnnnnnnnnnnnnnnnnnnnnnnnnnnnnnnnnnnnnnnnnnnnnnnnnnnnnnnnnnnnnnnnnnnnnnnnnnnnnnnnnnnnnnnnnnnnnnnnnnnnnnnnnnnnnnnnnnnnnnnnnnnnnnnnnnnnnnnnnnnnnnnnnnnnnnnnnnnnnnnnnnnnnnnnnnnnnnnnnnnnnnnnnnnnnnnnnnnnnnnnnnnnnnnnnnnnnnnnnnnnnnnnnnnnnnnnnnnnnnnnnnnnnnnnnnnnnnnnnnnnnnnnnnnnnnnnnnnnnnnnnnnnnnnnnnnnnnnnnnnnnnnnnnnnnnnnnnnnnnnnnnnnnnnnnnnnnnnnnnnnnnnnnnnnnnnnnnnnnnnnnnnnnnnnnnnnnnnnnnnnnnnnnnnnnnnnnnnnnnnnnnnnnnnnnnnnnnnnnnnnnnnnnnnnnnnnnnnnnnnnnnnnnnnnnnnnnnnnnnnnnnnnnnnnnnnnnnnnnnnnnnnnnnnnnnnnnnnnnnnnnnnnnnnnnnnnnnnnnnnnnnnnnnnnnnnnnnnnnnnnnnnnnnnnnnnnnnnnnnnnnnnnnnnnnnnnnnnnnnnnnnnnnnnnnnnnnnnnnnnnnnnnnnnnnnnnnnnnnnnnnnnnnnnnnnnnnnnnnnnnnnnnnnnnnnnnnnnnnnnnnnnnnnnnnnnnnnnnnnnnnnnnnnnnnnnnnnnnnnnnnnnnnnnnnnnnnnnnnnnnnnnnnnnnnnnnnnnnnnnnnnnnnnnnnnnnnnnnnnnnnnnnnnnnnnnnnnnnnnnnnnnnnnnnnnnnnnnnnnnnnnnnnnnnnnnnnnnnnnnnnnnnnnnnnnnnnnnnnnnnnnnnnnnnnnnnnnnnnnnnnnnnnnnnnnnnnnnnnnnnnnnnnnnnnnnnnnnnnnnnnnnnnnnnnnnnnnnnnnnnnnnnnnnnnnnnnnnnnnnnnnnnnnnnnnnnnnnnnnnnnnnnnnnnnnnnnnnnnnnnnnnnnnnnnnnnnnnnnnnnnnnnnnnnnnnnnnnnnnnnnnnnnnnnnnnnnnnnnnnnnnnnnnnnnnnnnnnnnnnnnnnnnnnnnnnnnnnnnnnnnnnnnnnnnnnnnnnnnnnnnnnnnnnnnnnnnnnnnnnnnnnnnnnnnnnnnnnnnnnnnnnnnnnnnnnnnnnnnnnnnnnnnnnnnnnnnnnnnnnnnnnnnnnnnnnnnnnnnnnnnnnnnnnnnnnnnnnnnnnnnnnnnnnnnnnnnnnnnnnnnnnnnnnnnnnnnnnnnnnnnnnnnnnnnnnnnnnnnnnnnnnnnnnnnnnnnnnnnnnnnnnnnnnnnnnnnnnnnnnnnnnnnnnnnnnnnnnnnnnnnnnnnnnnnnnnnnnnnnnnnnnnnnnnnnnnnnnnnnnnnnnnnnnnnnnnnnnnnnnnnnnnnnnnnnnnnnnnnnnnnnnnnnnnnnnnnnnnnnnnnnnnnnnnnnnnnnnnnnnnnnnnnnnnnnnnnnnnnnnnnnnnnnnnnnnnnnnnnnnnnnnnnnnnnnnnnnnnnnnnnnnnnnnnnnnnnnnnnnnnnnnnnnnnnnnnnnnnnnnnnnnnnnnnnnnnnnnnnnnnnnnnnnnnnnnnnnnnnnnnnnnnnnnnnnnnnnnnnnnnnnnnnnnnnnnnnnnnnnnnnnnnnnnnnnnnnnnnnnnnnnnnnnnnnnnnnnnnnnnnnnnnnnnnnnnnnnnnnnnnnnnnnnnnnnnnnnnnnnnnnnnnnnnnnnnnnnnnnnnnnnnnnnnnnnnnnnnnnnnnnnnnnnnnnnnnnnnnnnnnnnnnnnnnnnnnnnnnnnnnnnnnnnnnnnnnnnnnnnnnnnnnnnnnnnnnnnnnnnnnnnnnnnnnnnnnnnnnnnnnnnnnnnnnnnnnnnnnnnnnnnnnnnnnnnnnnnnnnnnnnnnnnnnnnnnnnnnnnnnnnnnnnnnnnnnnnnnnnnnnnnnnnnnnnnnnnnnnnnnnnnnnnnnnnnnnnnnnnnnnnnnnnnnnnnnnnnnnnnnnnnnnnnnnnnnnnnnnnnnnnnnnnnnnnnnnnnnnnnnnnnnnnnnnnnnnnnnnnnnnnnnnnnnnnnnnnnnnnnnnnnnnnnnnnnnnnnnnnnnnnnnnnnnnnnnnnnnnnnnnnnnnnnnnnnnnnnnnnnnnnnnnnnnnnnnnnnnnnnnnnnnnnnnnnnnnnnnnnnnnnnnnnnnnnnnnnnnnnnnnnnnnnnnnnnnnnnnnnnnnnnnnnnnnnnnnnnnnnnnnnnnnnnnnnnnnnnnnnnnnnnnnnnnnnnnnnnnnnnnnnnnnnnnnnnnnnnnnnnnnnnnnnnnnnnnnnnnnnnnnnnnnnnnnnnnnnnnnnnnnnnnnnnnnnnnnnnnnnnnnnnnnnnnnnnnnnnnnnnnnnnnnnnnnnnnnnnnnnnnnnnnnnnnnnnnnnnnnnnnnnnnnnnnnnnnnnnnnnnnnnnnnnnnnnnnnnnnnnnnnnnnnnnnnnnnnnnnnnnnnnnnnnnnnnnnnnnnnnnnnnnnnnnnnnnnnnnnnnnnnnnnnnnnnnnnnnnnnnnnnnnnnnnnnnnnnnnnnnnnnnnnnnnnnnnnnnnnnnnnnnnnnnnnnnnnnnnnnnnnnnnnnnnnnnnnnnnnnnnnnnnnnnnnnnnnnnnnnnnnnnnnnnnnnnnnnnnnnnnnnnnnnnnnnnnnnnnnnnnnnnnnnnnnnnnnnnnnnnnnnnnnnnnnnnnnnnnnnnnnnnnnnnnnnnnnnnnnnnnnnnnnnnnnnnnnnnnnnnnnnnnnnnnnnnnnnnnnnnnnnnnnnnnnnnnnnnnnnnnnnnnnnnnnnnnnnnnnnnnnnnnnnnnnnnnnnnnnnnnnnnnnnnnnnnnnnnnnnnnnnnnnnnnnnnnnnnnnnnnnnnnnnnnnnnnnnnnnnnnnnnnnnnnnnnnnnnnnnnnnnnnnnnnnnnnnnnnnnnnnnnnnnnnnnnnnnnnnnnnnnnnnnnnnnnnnnnnnnnnnnnnnnnnnnnnnnnnnnnnnnnnnnnnnnnnnnnnnnnnnnnnnnnnnnnnnnnnnnnnnnnnnnnnnnnnnnnnnnnnnnnnnnnnnnnnnnnnnnnnnnnnnnnnnnnnnnnnnnnnnnnnnnnnnnnnnnnnnnnnnnnnnnnnnnnnnnnnnnnnnnnnnnnnnnnnnnnnnnnnnnnnnnnnnnnnnnnnnnnnnnnnnnnnnnnnnnnnnnnnnnnnnnnnnnnnnnnnnnnnnnnnnnnnnnnnnnnnnnnnnnnnnnnnnnnnnnnnnnnnnnnnnnnnnnnnnnnnnnnnnnnnnnnnnnnnnnnnnnnnnnnnnnnnnnnnnnnnnnnnnnnnnnnnnnnnnnnnnnnnnnnnnnnnnnnnnnnnnnnnnnnnnnnnnnnnnnnnnnnnnnnnnnnnnnnnnnnnnnnnnnnnnnnnnnnnnnnnnnnnnnnnnnnnnnnnnnnnnnnnnnnnnnnnnnnnnnnnnnnnnnnnnnnnnnnnnnnnnnnnnnnnnnnnnnnnnnnnnnnnnnnnnnnnnnnnnnnnnnnnnnnnnnnnnnnnnnnnnnnnnnnnnnnnnnnnnnnnnnnnnnnnnnnnnnnnnnnnnnnnnnnnnnnnnnnnnnnnnnnnnnnnnnnnnnnnnnnnnnnnnnnnnnnnnnnnnnnnnnnnnnnnnnnnnnnnnnnnnnnnnnnnnnnnnnnnnnnnnnnnnnnnnnnnnnnnnnnnnnnnnnnnnnnnnnnnnnnnnnnnnnnnnnnnnnnnnnnnnnnnnnnnnnnnnnnnnnnnnnnnnnnnnnnnnnnnnnnnnnnnnnnnnnnnnnnnnnnnnnnnnnnnnnnnnnnnnnnnnnnnnnnnnnnnnnnnnnnnnnnnnnnnnnnnnnnnnnnnnnnnnnnnnnnnnnnnnnnnnnnnnnnnnnnnnnnnnnnnnnnnnnnnnnnnnnnnnnnnnnnnnnnnnnnnnnnnnnnnnnnnnnnnnnnnnnnnnnnnnnnnnnnnnnnnnnnnnnnnnnnnnnnnnnnnnnnnnnnnnnnnnnnnnnnnnnnnnnnnnnnnnnnnnnnnnnnnnnnnnnnnnnnnnnnnnnnnnnnnnnnnnnnnnnnnnnnnnnnnnnnnnnnnnnnnnnnnnnnnnnnnnnnnnnnnnnnnnnnnnnnnnnnnnnnnnnnnnnnnnnnnnnnnnnnnnnnnnnnnnnnnnnnnnnnnnnnnnnnnnnnnnnnnnnnnnnnnnnnnnnnnnnnnnnnnnnnnnnnnnnnnnnnnnnnnnnnnnnnnnnnnnnnnnnnnnnnnnnnnnnnnnnnnnnnnnnnnnnnnnnnnnnnnnnnnnnnnnnnnnnnnnnnnnnnnnnnnnnnnnnnnnnnnnnnnnnnnnnnnnnnnnnnnnnnnnnnnnnnnnnnnnnnnnnnnnnnnnnnnnnnnnnnnnnnnnnnnnnnnnnnnnnnnnnnnnnnnnnnnnnnnnnnnnnnnnnnnnnnnnnnnnnnnnnnnnnnnnnnnnnnnnnnnnnnnnnnnnnnnnnnnnnnnnnnnnnnnnnnnnnnnnnnnnnnnnnnnnnnnnnnnnnnnnnnnnnnnnnnnnnnnnnnnnnnnnnnnnnnnnnnnnnnnnnnnnnnnnnnnnnnnnnnnnnnnnnnnnnnnnnnnnnnnnnnnnnnnnnnnnnnnnnnnnnnnnnnnnnnnnnnnnnnnnnnnnnnnnnnnnnnnnnnnnnnnnnnnnnnnnnnnnnnnnnnnnnnnnnnnnnnnnnnnnnnnnnnnnnnnnnnnnnnnnnnnnnnnnnnnnnnnnnnnnnnnnnnnnnnnnnnnnnnnnnnnnnnnnnnnnnnnnnnnnnnnnnnnnnnnnnnnnnnnnnnnnnnnnnnnnnnnnnnnnnnnnnnnnnnnnnnnnnnnnnnnnnnnnnnnnnnnnnnnnnnnnnnnnnnnnnnnnnnnnnnnnnnnnnnnnnnnnnnnnnnnnnnnnnnnnnnnnnnnnnnnnnnnnnnnnnnnnnnnnnnnnnnnnnnnnnnnnnnnnnnnnnnnnnnnnnnnnnnnnnnnnnnnnnnnnnnnnnnnnnnnnnnnnnnnnnnnnnnnnnnnnnnnnnnnnnnnnnnnnnnnnnnnnnnnnnnnnnnnnnnnnnnnnnnnnnnnnnnnnnnnnnnnnnnnnnnnnnnnnnnnnnnnnnnnnnnnnnnnnnnnnnnnnnnnnnnnnnnnnnnnnnnnnnnnnnnnnnnnnnnnnnnnnnnnnnnnnnnnnnnnnnnnnnnnnnnnnnnnnnnnnnnnnnnnnnnnnnnnnnnnnnnnnnnnnnnnnnnnnnnnnnnnnnnnnnnnnnnnnnnnnnnnnnnnnnnnnnnnnnnnnnnnnnnnnnnnnnnnnnnnnnnnnnnnnnnnnnnnnnnnnnnnnnnnnnnnnnnnnnnnnnnnnnnnnnnnnnnnnnnnnnnnnnnnnnnnnnnnnnnnnnnnnnnnnnnnnnnnnnnnnnnnnnnnnnnnnnnnnnnnnnnnnnnnnnnnnnnnnnnnnnnnnnnnnnnnnnnnnnnnnnnnnnnnnnnnnnnnnnnnnnnnnnnnnnnnnnnnnnnnnnnnnnnnnnnnnnnnnnnnnnnnnnnnnnnnnnnnnnnnnnnnnnnnnnnnnnnnnnnnnnnnnnnnnnnnnnnnnnnnnnnnnnnnnnnnnnnnnnnnnnnnnnnnnnnnnnnnnnnnnnnnnnnnnnnnnnnnnnnnnnnnnnnnnnnnnnnnnnnnnnnnnnnnnnnnnnnnnnnnnnnnnnnnnnnnnnnnnnnnnnnnnnnnnnnnnnnnnnnnnnnnnnnnnnnnnnnnnnnnnnnnnnnnnnnnnnnnnnnnnnnnnnnnnnnnnnnnnnnnnnnnnnnnnnnnnnnnnnnnnnnnnnnnnnnnnnnnnnnnnnnnnnnnnnnnnnnnnnnnnnnnnnnnnnnnnnnnnnnnnnnnnnnnnnnnnnnnnnnnnnnnnnnnnnnnnnnnnnnnnnnnnnnnnnnnnnnnnnnnnnnnnnnnnnnnnnnnnnnnnnnnnnnnnnnnnnnnnnnnnnnnnnnnnnnnnnnnnnnnnnnnnnnnnnnnnnnnnnnnnnnnnnnnnnnnnnnnnnnnnnnnnnnnnnnnnnnnnnnnnnnnnnnnnnnnnnnnnnnnnnnnnnnnnnnnnnnnnnnnnnnnnnnnnnnnnnnnnnnnnnnnnnnnnnnnnnnnnnnnnnnnnnnnnnnnnnnnnnnnnnnnnnnnnnnnnnnnnnnnnnnnnnnnnnnnnnnnnnnnnnnnnnnnnnnnnnnnnnnnnnnnnnntgtcttggcacgcagcattcctaaaggattctattacactttaaaaatattataaattgaaggcctgcctgctcatggcctgaaactgagggtgagaagccaaaactggggcatgagccccctaagctgagtgcctgaggggagccagtgacccccagctctggctagtgtgctggtttctaggcagccttgccctcactgaatcttgggtccttagttgtaatagaaccctttctccaccacatctcatggactcatgggaaaaaaccagtatatgtgtgtgtgtgtgtgtgtgtgtgtgtgttgggatggggagaactcactgtttctccagtctagcccagggccaggagtctcccactttcctttccacccatgcatgggggagacttgaaatactgcttttcttccccacctgtcctggagcatggagagcatttccgcatagacatcttcgagggctgcaacttcacgggccagtgcctagagttcgtggaggactgccccttcctgcagagccggggctgggccaagagctgtgtcaacgccatcaaggtgtatggggacggagcgtgagtacagctggggcttccagacaggcttggtagggtggatagccatcagaccctgtgggtgactcacgagaaccccagcttcctggggtgccaacttacacagcagcgtcacctgctcagagaaggtccatcttctcagctcggataaccctgggcctgggcctctctgcctggtggcttacagcccacaccaacttgttggagatgggcttcaaggggctctcctaggatggatgagagtgtctgggaattgtgcctgtcttcgctagtccaaggcatctgtcagacccggtgcttgccttgtggggcagcttcctggcgcacctgcccattgtacacatgcaggcgcccctcacctggggtttctcctgccctcgcctgaactatctgcctgtgcacacacagatggggctgaacactcaacactctcttcccatcttccctgcccattctggagaagccatcaccattttatagaagcacaaactgactgcagttaactccagagcctttctttccacagcagaagccctgctgggactgcagcctaggggagccccttctaccctagagctgggtacccttcaacctcctctccccccccccaccccagcagaagagccccacaggatcccagcttccctgcacagggttggtgtggggaatcagctcccatggaatttnnnnnnnnnnnnnnnnnnnnnnnnnnnnnnnnnnnccatcttacctgaccccctcccccaagcagatgatacccgagagtccaggggtaggagtccaaaacaatttgccttgagaaattcccaggctaagttgtgtctcatgagatcagaggcatacttttgtatgggagatgtcaggagacccaagacagaatcctcctagcaaccctgggagcctgagggagggaaggcaggagtggacactggatggaagagaatataatctccactttccaggaaggaaccagtctcagtggccaggaggttgaggccaagatgatggatccagagtgttcttatctttgataaccttaactcttatgtgatataagtcttgtgcagaagtagcttcgaaaacggtgatgccctgggtccctggagccctttctgggatccggccagcagtaaagcagggctcctcaaccacctccctgtgccaagagtgttgttccttgtgggttccatgtcagctcaggagtgaacggtccctcatacctgtgtcctaggaggcatgtcaggaaaagcagggacatcccccaacactccaacagactgagcgcccccccttctaaattttaaaaatgatttttatttccatacatttgtcttacttgcatgcatgtctgtgcatcacatgcatgcccggtggggtcagaagcaggcattaaatttcctggacctggagttacagacagttgagagctgcagtgtgggtgctgagaagcgaacctggctctggacaagcagccagtgctcttatctgctgagccgcctccccagagaccccttctctgttgctttcctctaagagttgcagctaggtgagcaaggatgcgcaggattagctgtcacaccagccaggtcccttttcctttcagaatgtccacaagagctccaagatggctcagggcagtacagaatagagactggctcactctcttggagactctagctatgtggtggaaggctgtggttgtaaggaagtgatctgctcgtccctagcatgacaccccccccacacacacaccccttagtttccaatccctgaccctactgtcagattgtaccatttaccaggtgaggggtcaagatgatgaagggaggggcctacgatgacttggagtggaagagctaagggctaaggaaaaggaagtgagctatgtgacctttagtttctccctctccccctccccctccccctctctctcggctgagctgtctgcaagcagaaaggcaaggacactccctgggagggaatttgagaagtttgggactgagtaagaactgcctaggcacatcgcgggagggaggttccccgagaagagaggtcagagtaatactacaacctggatcttagccatctcctcaagaggccgtgagcacccgagcacgcccgagggagtcctgccccagagaaaagctgttttctactctagtgaaagagggggaggggagagcccgaggtaaagacagagacagccctctggtgcaggcaggcctggcggctcctcctccccgacttcctagctcccttaggccagcctccaaacctgagccccaagtgagagcgtccacacgacgactctccctgggtcccacatttacacctctatacttattaagaaccttttccttatgcctgttcccaggaagagaccacccatccgatcttcccagttaatcttcctgattccctggtccactgggttgtaaaggacaggggcctggtacacaccttccccccaaatcccccaacacaagggcgctcttgtcagacctcctgtcctgccagctccagatcctctgtacaacgcaggcagcacagcccacttgtactagagcacaggcaccgccacggctgttggctgagtggatacacagtgggaacggtccccagtttgtgtcaggcgtcctgtcaagagctgggtactctgtgcaaaaatggccctttggtgggtgactgggcatagtgcatccccagtcgctctcgcttttgtcatgggatggtcaattactgggcagtccccatcttgtcgaaccccagcaccaagcccgaatcagacatcgtcaatcaaggtagtgaggagctaggaccgaggggcgggggcggggccggggccggggaagcgtcctcgtgtggttccctccgggtgactcgcccttcctctgcccttcaggtgggtcctctatgaggagccaaactaccgcggccgcatgtacgtgttggagagaggagactaccgctgcttctccgactggggggcccacagcgcacgcgtgcagtcgctccgccgggtgctcaacttcttctagtcccaactgcgtacgtgcgacccacggaggcaataaatatccagaaagcggagtgctggcgggcctcggagtgctttctaggcctctcaccggctggcgggccccaaccgggcagggggaagcctcctggagcaaggaagccaactaactcccttccctgccaaagcctagccagagcagcagccgcctcggggctcagggccacacgagggcgcccgcgagcaagacgcaggcaggctgttttctcctgctagggggccacgcccgagaggaggggcgaggtggcgggggtgggggtggtaggatcatcgctcaataaacacccatagtaatgctattcacaataagcaaaagagtgtgagacccttagccagggccagctggattctgccctcctctgatgtgttaggggctggagtggatggttatggaggagaaggaaggacannnnnnnnnnnnnnnnnnnnccattgcccctacactgaaccacacatttgcatatattaggatatttgacttgagcttgggagaaaaccaaaagtcctgttctttgtgaaataatgcaaacctatctgttacacacaccctacatatgtgaaagcgcaagccagctgtggtgactcaaggccccgtcctaagcaaaggcaggtagatcactgcaagttcaaggccaacttgatctacatagcaagttccaggccagccaggagtgaggccctgtctaaaaaaagccaacaccaaacacaactaaagaagcccagcgacctgtgagaggacagttgtagcatggcagtttgcatgcagccatggagctgtgctcccaacgtgaagtgaagcgctttatgatgtgtgtgtcagtcagtgaccatgtactcgagggaagcagggagaagaactgggtgacagcaggactctcactcaggggtgaccctgtagccatacacttttttgcaacccacttttttttttttttttttcgagacagggtttctctgtgtagccctggctgtcctggaactcactcagtagaccaggctggcctcaaactcagaaatccgcctgcctctgcctccctcgtgctgggattaaaggcgtgctccaccacgcccggcttgcaacccacttttaatgagggttccacctctctcctctagcccatcacccagcagaggtatggaggagaaaaggtattaggatatggaggaggtggacctgttcagcaatggttctttaggagcgagtttgatctttttggacagcagttcagtcccataacaaacaccaaatacaactcagcagctgcagagcagccctctaggcaggcagacaccaggcacgaaccagcagctgcagtccagtcctttcagcacgcagacaccaggcagctgtagttcagtcctgaagaaaccaccaggctcaccaaccagcctacggtgaggctgtggaggcaagcaagctgctgcaggaatcttatgagcagttcttgggtgagtttctctcaatgacagcattaccacaagttgagctcaacaacagtatgaaaggagaaccaataaatgcatgtctttagtgaagaatagtgaggcagagcaaaccaaatgaaggctcagtgctcctctcccactgtctgtggggtcttatttatacttctccatcacacatcctttcacccgtgtctgcttcaggaaatcagtctttcacgtgtttgctgtaacaagacatcctttcacctgtgtgccccagcacaacatcatttggcatagctaactttccagagctagaagttaccacttcactgccctgtgcctcagtgtccacagaggcaccggggtgggggataatagtctgctctaatgggggaggggcttcctcctgggagccagatggcacccactgccctaccttgccaaagccagttgcagggactcctcttgaatttgcctctctcccagctcccaggaacagaggcgcctcattagggcgagtcagtgtttcacacagctttgcattcctgggtgacctccctgtcaccccagccccctgcttgctaatctgtcagtaaaatctgcttttggtcaggaagaagaaaaacaagcttctcactgcagagcctgtgggcagctgtgcagtttatctgaagtccatccagggggtcgatgaaccgaagatgagagagcctttagtgtggtacatgcttctcccatttctgtctccacgctgcggtttggaaaactgggccttcttagagccatctccgtgttcctcagaccccttgctggtcagggatctgaaggcattgtttatcaggcctggtcagaccacaggggaaaactttccctttgaagcccatactgatgcctagccatggctgtggtgtgcctctccctactcctcagcccataccagggtgatgcactagtctctgtccactcctttccctggcttccctctgccccatctccagctgtgtcctgcttggccactccttggctggaaagccttcagagcagagctaacccctaagtgtccttttccctctagaaacctcggtagaggttttaacataacctgtgagacgagacatgttttaaaatccagcttcatggctgagggtgtagctagtggctgagcacttaccctaccatgtgtgaggctctgaattctagccccaccactgtgaaaccaaaaataaaccactgcagggtgtggtagtgaaggtcttgaatcctagcactcaaggcagaggcagagaaacagagagacagagaggcagagagagaggcagagaggagaggcaaagaggcagagaggcagagaggcagagaggcagagaggagaggcaaagaggcagagaggcagagaggcagagaggcagggaggagaggcagagaggcagagagggagagaggcagagaggcagagaggcagagagaagggcagagaagcagagctctgtgagtttaaagccagcctagtctacagagtgagttccaggaccgccagggctacacagagaaacattatatccaaaaaacaaaaccaataataatagtgataaataataataataaataaaccgccacagagttccctttggtgtgttagctacttttctcactgtcagaatacctacagagcaacttttagaaggtttatctgggcttatagtttcagaaggtatgggccatcatgatagccagactgtggtggggttttttaccactatgtgtctgttggtggggaaggtagctgggggccccagccaggatcagagatgcatattcttcaaggtttgctccagagacccgtatctgagagctggactatatatcctatatgtcccaaagattctacaatcttcccaaaacagtgtcaccagctggagaccaagagtgcaagcacaggaccctattggggggcattctacattcaaatcctaccagctggagaaggtacagtgctaggctgaggtggtgacaatgtgtacacagcagtgtgaatgtgcacacagtgtgaatgtgtaatatggcactgtaaatgtgcacacagcagtgtgagtgtgtgtacacagtgtgaatgttcacacagcggtgtgcatgtgtgtacacagtgtgaatgtgtgcacagcagtgtgaatgtgcacatagcagtgtgaatgtacacacagtgtgaatgtgtaccacagcagtgtaaatgtgcacatagcaatgtgagtgtctatacagcagtgagtgtgcacacagcaatgtaaatgtatacatagtagtgtgaatgtatacacatcagtgtgaatgtgtgcccagcagtgtgtgtacacagtgtgaatgtgcacacagcagtgtgagtgtgtacacagtgtgagtgtgcacacagcagtgtgaatgtgtgcataggagtttgaatgtgtacatggcagtgtgaatgcttcctctgccatggagacatgcattcagccatagtggctgtggtgggttggatgctatgtggattttgcacagaacaaaagcttcactcttcttgttgaggtacacagagtctcagagccatttgcgtgtgcttgtggtactgaagacccttcctgaccctggcaacatactgggtcttacttgtcccaaatgtgcctcacatagtccttgtcctgatgttcaccttttgttggtcttgtggttcccgttgattgcagtgcagggagcgctgccctgactgctgaggaacctcaaggggagacccatggagtaagaccactgcagagcaaggtggggctacctgagcctaacccaaccttctcaagccctgctcaggcaacaccttcatggtctggtgtcagcaaggacacagaaagaagtgacttgctatccttgttaagcctgccctgcaccatgaatgtttttataaaaaggctgttggcttccttgctgcctgtgaacctgctatgcagtctgtggaataaaacagtcctgtggagaccagctgcaactttcccttgtgacctctctagatgtgtgtgtgtgggagtggtggacagggtcacaacctgcaagtgtgcagttcctttcttagtaatgtggtgtggagtcacccttgaagccagctggcagctgtgcagtgttttgctgggtatggggtatatccagggtatatcagggtatagtcagggtccagtatatccagggagtcctgcctgggtccatcctgcaggtgtgcagccctttgttgaaaatgtaggtcaacaattgaattgtgggtcagtggtactatgtcagctgtggctaagtgttctaatctgtgagaccacatgtctacactccttgggtggggacagagatcctgggtggaatgagaccagtcattgccaatagaacaagtttaagatgaggtaggactcaggtttaggcctaaagtagttttaatgagtggccaggaaggccctttctattcatcctaccagagtcccaggacccagaatggaaaatcttactgttgaagaaagctcctttgtcttgcctctgatccctttcccacagagtagtagatgcttagtggtggtggtgaaatacaatgttatatattatttgtaattcattgttcctctataaaattgagttgagggaaaggaaatagtatgataaaaatattgtatggtggtgcacgcctttaatatcagcacttgagaggcagaggcaggcagatctctgtgagtttgaggccagccttgtctatagagtaagttccaggaaagtcaggactacatagataaaatctgtctcaacaaaacaaaacaaaaaaccagtaggagattctggcttgatgggagactgagacaggaagttcgtgagttggaggtcagcttggaatacaataatgaatcccaatctaaaaacagtgtaaaataaaatagtctttaaagagatctctggagcacagaagttcaaaccaggagcaggaaacggcaaggctaagtaagcaaatcatcacagagccagggtctttgtggagaagaccccgcctgaatcggccaacgcagaacgcggcccgggttccgtggctctctgaatctgagtaatagaagcatgaggtttcttcacacacagtgattcctgggatgtgggccagaggaaagcttctcctgggggcatctgaatccaggctgagggtcacgagccccgctggagctgtgtgctccagtgaagaaaataatgttctgaggatgaccacacattggctctatgccttctatacctttcaaaccttctaaggagtctgatgtcagacaatttgtttccaacagatttaaacacagtgtagtttagaaaacagtttcctggtgtagtgcaatcccaggtgcacatggaagtataattacatcaaaactcaactgaggctaccctggaactcactccctagatcaggctggcctcgaactcagaaatccaccttcctctgtcaccactgcctggtgttataaagacttatttttaattgtgtgtgtgtgtgtgtgtgtgtgtgagagagagagagagagagagagagggagagagagagagagagagagagtttgtgctcattgagtggaaatgcccgtggattccacaaccctcagccccactgcaactatatagctgtgagccacccgatgtgggtgttgggaactgaattcaaaccctctgcaagagcagagccttttatctcaccagtcaagtgtgatggtgcatactgtaacctcagcactggggaggtggggacaggaggattccccaaagcttgctgaccagccagtcttaccaaattgctaagttcgaggttcactgagagatcttgtccccccaaaagaagcagagggttgccgggtgtggtggcgcacgcctttaatcctagcacttgggaggtagaggcaggtgggtttctgaattctaggccagcctggtctacaaagtgagttccaggacagccaggattatacagagaaaccctgtctcaaaaaaccaaaacaaaaaagaaaaagaagaagcagagggttgttaggagcaccgtatgaagattcttgtgcccagagatctccaggaaaaccaaaagttaaacacacaggattgnnnnnnnnnnnnnnnnnnnnttaaacacacaggattgtcttctcaaaggaatggatgtaaaatctgttctttccatctagagagctggaaattggaggtgattaatggcctgccgatctgcattacctattggcccgggccatatcaagcttctagaaccaggaccaggggtggctagtaatttaaatgcccctcacagtcaggagcgcccctgaatgacccttacgttgcctgcattgtcagaggcaagattcttccttactcccttaagctagcacagctagcctagttctagaacccatcttcttggaagaaatgatgtgaatacagcagcatgaatgctggtacaagttgctttttcttcttcttcttcttcttcttcttcttcttcttcttcttcttcttcttcttttaagatttatttattcattatatgtaagtacactgtagctgtcttcagacactccagaagagggagtcagatctcattacggatggttgtgagccaccatgtggttgctgggatttgaactctggacctttggaagagcagtcgggtgctcttacccactgagccatctcaccagcccctgctttttcttctttacttagtccaggacccagccagggcacagtgccatccacagtggctctgcctcccacctcagttaacctagtctagaaactccctcataccatgctcagaggcttgtttctgtgctgattctaagcctaagttccaagactaatagccacacacttacatgcctgatgtatttgaaggttatcttcatctatgaatttcttggttctgttactaataggaactccatgaaatgattagcacattagaacatcattgaacccaaatctctggtcattgacaagatggcttgagccacactcattgccccaggagctcaagctgccctcgtgctctgggaccctgtgatgtgtagcaacagtggtgtgtactgcttctttgaacctctgcttggccagctgccaccccttaatgtgtgcactattgcaacaaaactgagtctcagtaaaactacgtgcacagtgcttgctgtgcacttcatgagggcttgagtttgagtcctcggaacctgtgcaaaagctagactcattgcagtcctagagctccactagcaagatgggaggcagagaccagataatctcccaaagccaactgatctggcttaagcggcattgaatgagactgctttaaacaaggtataaggtgaggaccagtatttgaaattgtcctctgacctgcacacatgcgctgtgacatgtgcacactggcatgcacacacacaaacctgcacacttatgaacttgcacatatcttacatagcaaaaggcagtcgtggtgacagtggtggctctgctgccctggctctcagcagaggacactgagcgcagagagaaaaccctgagcagcctggaggcatgaagctgtgctcagagcctccacagagagcaggcctcagcatggttctgagggccgtgcggctgttggagtgagtgaaagcagatgctgttctcaggcctcctcgctagaccctcccactcagacacatatggctttacacacacgtgctcacacgtactcacagaaacgtacactgatattcagatacgcatgtgcacacaaacacactttcacactctcatgcacacatctgcaaacatgcatatgtgcacacacgcatcactcacatcccacaggaggcctcgcagcatgcatgcatccagatatgcaagcacattctcactttacatgagcacacatgggcactccacactaatggctgctctcgtgcatgctggcatacagtctcttacacacattccttcatctgaagccgtacgtgcctgctgagggtcgtatgaagggtgggagacagctgtgcctgggatggaatttagatgtattttcacagatgcacacacttgggaaacaatcaccactgtccagagagggaactagtgacttctgagttgtttcttctgagtttttgtttgtgtttttccttttcttttgagacaggatctcagtatgtagcctcagcaggcctggaactcatgatgtagatcaaaatgcttaaaccctgcctctccggagctagggtaacgggtgtgcatcacaagcctggtctggggcatttcttaaaaaaaaaaaaaattacacttaattagtttggctaggcagcagtgacacacaatcccagctctctggagacagaggcaggtggatctttgttagtttgaggccagcctggtctacagagagttccagagctgcctgttagaagaaccctgtcatggaaaaaaaacaaaacaaaagcaaaaccaaaaactaaccaatcaaccaaccaaacaaacaaacaaacaaaaaaaacacttatttatttggaattgggttacgcatgccaaaatgtgtgtgtaaagatgagaggagcacctgtgagaggccgttctctccttccaccagagtctagagactggactaaggtcttcaagcttggtagcaagtgcctttacctgatgaatcattttgccctagtattattcatgaatgtatgtatttatacatccacttattttagtttatgagtgtcttacttacatgtgtgtatgcctggtgcccatggaagtcaggagaggcatcagaccttctgtatataactagatttatagatggttgtaagccatcatatggatgctggacccaaacccaggtcctctgtaggagcaatcggtgctcttaactgctaatacatttctccagccccgacacagtcttatttttattatgtgtgtgtgtctgtgtgagtcagttcccttctattgtgtgagtcccacagactagattcttgtcatcgggcatgggggtcagtctctgctggcccgttttttgtgctggaggttcaacaaattctttggaactctggattttaacttcatatccaatgtggtgactctctaccacagattcctctaacagcttttcccctctctgttctctttcctaagacacttcacactggttgaattcattctgggtcacggttttcttttcatttactgtatttttagtggccttccttctttgcccaagtaatttttccttctgtttcattccctgaagtttgcactgcactgtttttgagtccatggtcttctgtaacacctaatgagctgtcaatctcatcccaagttgttgcttaactttagacatcatttttatctctagctcaatctgggactctgatatcttcaatgtttttgtgtggaaggaagggtggatggggtctgtgttctggacatatcctctgccaccgagctgcctctacagactttttcaacgtgtggaatgtaattcatgactgctggacagg

SEQ ID NO: 949 - DNA, 333 bp, Mus musculus
atgcatgggggagacttgaaatactgcttttcttccccacctgtcctggagcatggagagcatttccgcatagacatcttcgagggctgcaacttcacgggccagtgcctagagttcgtggaggactgccccttcctgcagagccggggctgggccaagagctgtgtcaacgccatcaaggtgtatggggacggagcgtgggtcctctatgaggagccaaactaccgcggccgcatgtacgtgttggagagaggagactaccgctgcttctccgactggggggcccacagcgcacgcgtgcagtcgctccgccgggtgctcaacttcttctag

SEQ ID NO: 950 - protein, 110 aa, Mus musculus
MHGGDLKYCFSSPPVLEHGEHFRIDIFEGCNFTGQCLEFVEDCPFLQSRGWAKSCVNAIKVYGDGAWVLYEEPNYRGRMYVLERGDYRCFSDWGAHSARVQSLRRVLNFF

SEQ ID NO: 951 - DNA, 29454 bp, Homo sapiens
actgcgcttcgctagcggagcgttgggcagagcgggcatcgctgccccatgcagccctggaccgcggacggagtctagtctccccgctctcgcccacgcctgagctttggtatgcaaagtgtttccaactttttgttcgtttataaatatctttaataaatatatatattgagacggagtctcgctttgtcgtcgcccaggctggagtgcagtggcgcgatctgcaacctccgcagctcactgcaacctctgcctcccgggttcaagcgattctcctgcctcagccttccgagtagctgccactacaggtgactgcccccacgcccagctaatttttgtatttttagtagagacggggtttcatcatgttggccaggctggtttcaaactcctgacctcaggtgatccgcccgcctcggcctctcaaagtgctgggattacaggcgtgagccacctcacccggtctctctctctctcatgtatatgtatgtgtgtgtgtgtatatatatatatataatttaagtagagacaaggtcttaccgtgtttcccaagctggtctcgaactcctgggctcaagcaatcctcctgcctcggcctcccaaagtgctaggattacaggtgtgagccagcgcgcccagcccgtttgtaaacatcttttgagcgcctcctccttggtgtccacagctctagcgctgagcgcctcgcccacacagatgcgatggtacccgctggcgagagaggttggggagtggggctggggggaggcgcgggcagcgagaccaggtccttgagccctgggaagctcagctcaggtgttgggaccgcaccccaggatgggtgcaacatctcaggaggcctgatctcagggtcctgcgtgtcctggtccctgcttcacttgaagggccatgggaagccattgagcaattttaggtaggatcacattataggttttaagtgagtattcacattagagcacctaggagccccccatttgtaatgtcttgtcttttttttttttttttttttttttttttttttgagacaggatctttctctgttgcccaggctgtactgcagtggtgcaatcttggctcactgcggcctcgacctcctgggctcaagcaatcatcccacctcagcctccctagtagctgggaccacaggcatgtgccaccatgcccggctaattttttaatttttttgtagagacaggatcttgcgttgttgcccaggctgatttcaaactcctgggctcaagcaatctttcctccttggcctcccaaagcactgggattacaggcatgaaccaccttgcctggcctgtaatgtcttatttcttaaactggaaggtagatttgctgcctgaaatgactcataatatatatatagggaaaggagccgctcttgctgtgggtggagaacggtctggaggagcccagagcagacagactgggatgctgagaggctcctgcagcagttccactggtactgacagtggctggagctgggagtgggcatggagaaggaagtggggaagggggcagaacctgggggtctcacacagtggtgtcacatacagcctcaatttggaggggagtcctgagtcctgtctctcaaacgctacccaggatggcctctcccaagccccaggaccactctgctcccaagagcattaggatgacgctggaggcagggggctactgggaaagtgcctcccctcagcctgtcacacacacccagagctccagagtgaagggctggaagggcctcattgcccactcacatgactttgtattgaattagggcaggtttgggagtagcaacaaactgggaaaagtctaaaatgaacccacacaacaaggaatagacaacagcaaaggaacagatagcggactcacacacacacacacagcaaaagaatagatagcaagttaaaacacacacagccaggcatggtgcctcatgcctgtaatcccagcactttaggaggccaaggcaggaggatcccttgaggccaggaactcgggaccagcatgggcaacatagtgagaccccgtctctacaaaaaattttaaaaacctagctgggtgtgggcgtgtgcctttagtcccagctacaagggaggctgaagcaggaggatgccttagcccagttgtttggggctgcattgagctatgatcgtggcactgcactctggcctgggtgacagagtgaaactctgtctctaaaacaaagaaacacttgcacacacacaggcacacacacataatcaataaggaaagacagaaaaaaatgagcaaagcatatgaacaagcaatttacaaaagatccaattcaaatgaacgctatacatttgaactgatgttgagcaactggccttggaactaccaagggtagatctcatctgtatgtcagtggggcaatttggaagacctctgtggcatctagtggcttgaaggtgaactcatgcttcaacccagcaatttcacccagaggcatgggcctcaaaggaggcagtattggtcccagggtgtggttggaattttgtagggtgtttctgtttgtcagaatgctggaggatgggtgggcaggccccaggatgctggatatcccaccacatccaaggagacactgtcccacaatttcccctagaaacgcatagtattttttgtgtggctttaatatatactgaagatttcctggtatgcaatttattagatatataaatggaagattttacttagttttctgaggaattctactgagctttgttcattcaccatttcagaaactcttgtcactaaaacaaaaaaccaaattgcagaaggctacatataatgtagccacactaaaaattttctattatttacagatacatacaaagaaagtaaaaagatgaaaacacacaaagacataacacaaaaatcaggacagtatcttatccttatggggaaggaagccttcaattctatgtataatgatttcttattttaaggaaaaacattgatccgacataaacctggcaaaatgctaagatttgacaaactttgtatggtggtgttattgttccttatattatttcctattcttctctgtgctctaaattacccaaaaacgggagagacaagaggcagagaagggaggcaggcaaacgggtgatggctcagggtgatttattattaaaaccattagcctccacgctgtaaaactctccaatgctgagcagctactggtagttctaaggctacatgttattgagattttattttttaagccatgatagcattcttagccttgcttcttctgtgctgtcacgatatttattctcagtccatttccttagaattttgtccccaactagcagctgtatagtgactcaagatctcacctacctcaaggtacattttaacagtgctctaccaaagatgactcaaaaaaatgactctgatgttgaggtttggtgatactggcatttgcatattatgtagctattttggggaggggttctacctggccacaaatagataatatgaatcttagcagactcctcctctggtaactgaattataataaaatcccaggtgggaattgagatattgcattagaaatagggaatggaggtgaaatttgcaggtatcttattcatctacccatttttaataattctttgcgtggggctttcagctaggcattttttcatatatatttctcagaaaacaccccaaatcactgcttctgttttggattctgttgtcatcacctttttgggttgtctgtgtgctctggccctgctgtgatgagggcaaatacaaattaaaaagaagaagttcagctgggcacagtggctcacacctgtaatcccagcactttgggaggccaaggcaggcggatcacttgaggtcaggcattcaagaccagcctggccaacgtggtgaagccccatctctactaaaaatacaaaaattggccaggcgcggtggctcacgcctgtaatcctagcactttgggaggccaaggcaggcggattgcctgagctcaggagtttgatatcagcctgggcaacatggtgaaaccccatctctactaaaatacaaaaaactagccaggcttggcggcgtgtgcctgtagtcccagctactcgggaggctgaagcaggagaatcgcttgaacccaggaggtggatgttgcagtgagttgagatcacgccactgcactccagcctgggcaacagaacaagactccatctccaaaaaaaaaaaaaaaaaaaaaaaaaaattagctgggcgtggtggcacacacctgtagtcccagctactggggaggctgaggcaggagaattgcttgaacctaggaggcagagattgcagtgagctgagatcgcatcactgcactcctgcctgggggacagagcaagactccatctcaaaaaaaaaaaaaaaaaaaagctcttaaaacaacaatgagacaccactgcacacttatttgaatggctaaaatccaaaacttgatagcaccaaatggtcagaatgaaaaatcatatagccactttgaaagagagtttgacagtttctttttatttgatttgattttgaattttttagagacagggtcttgctatgttgtccaagctggtcttgaactcccggcctcaagtaatcctcctgccttagcctcctgagtagctgggattacaggtacaagcctctgcacctggcttttatttttttttcagtttgttgcacaactaaacatacctgtaacatatgatccagcaatcccactccttagtgtatagtgaaaggagcacacaaaaatctacacgtggttgtttatagaagctttcctcataattgccaaaacttggacacaaccaaaatgtccttccattgatgaatagataactaaactgtggtacttccagacaagggaacatgattcagcagtaaaaagaaatgagagactaggccaggaaaagatatgagggaatcttaaatgcatattactaagtggaagaaaccaatctgagaaagctacttgctgtcttagtccgttttgtgccgctataacagaataccacagactgggtaatttacaatgaacacaaatgtactggctcacagttctggaggctgagaagtctaacatcacggtgctggcatctttcaagggccttcttgctgtatcatcccatgggagaagggcaaagagagggtgagagcaagcggttgaccttgtagccctttatggtcagcgttaatccatgaatgagggtgaagccctcatgacctaaacccttcccatgagaccgcatctttcaacattgttgcattggggattaagtttccaacacatgtgttttgggggacacgttcaaaccgtagtagctacatactgtaagattccaaatacatgacatcctgaaaaaggcaaaaccgtgaagatagtaaaaagatcagtggttgccaggagttaagggggagagagggataaacagatggagcccaggggacttttttttttatctttttttttttttttttgagacggagtttaactctgtcgtccaggctggagtgcagtggcgcaatcttggctcactacaacctccaccttccaggttcaagcaattctcactgcctcagcctcctgagtagctaggattacaggcgcctgccaccacgcctggctagtttttgtatttttagtagagacagggtttcgccctgttggccaggctggtctcaaactcctgaccttaggtgatccacccgccccggcctcccaaagtgctgggattacaggtgtgagccgccgtgcccagcccacacaggggacttttaaggtggtgagaatactctacctggtgctctaatggtggaaccatggcattacactgtagaggcagcaaagttctacctccatcctcttagggtcctggctgggcctgagaaataaattgacctaagacagattaacaagagaaaagcatacaaacttatttaatacaagttttatgtggcatgggagcccttataaggagatgaagacccaaagaaaaagttaagagtcaaacacttacatactcaactggacaaagagtagcaagctgtgaaaaatcaaccacattatgtggggaggctttaaaaatgtgttattttaacaaagtctacgccgcattctctcaacttctcatcctgtatcccgatgtataacataggttcatcggctgtgacaaatgtaccactctaatgggggcgctgattgtggaggaggctctgtgtgtgtgtgtgtgtgtgtgtgtgtgtgtgtgtgtgtgtgtgtgtaggggcagggggtatacaggaaattgctgtaccttttgctgaattcaacttgaacctaaagctgctctaaaaaataaaacctttttttaaggcttatttttccctgttgaaaataagggaagaggcttccctttcctcccttttcttgcagaatttccttctctgtcattttcaaatgtgtgtaaatctttttaatggctaaacaagcctcttgccagtctaacaactcagtcatgtttcctctgggagcctctttgagtcttgacatcaaggagtaagtgcccccaccctccccgtttcctaagaagcctgacttcagctgtcacctgactccaaattgcaaaacccacctccagtcatagagatacaagaaaatcagcaattttatcctgaaaacatgaatgcagtgggttgtgtctgcttggctacagaagagtgagatctctctccatctttgcgatctcttaggggagagatcgtgatgcagatcgcattccagtttaaagtttattcaataataaaattgtttttttttccttctaccttcgtggagaagttttctgggttggctggagattttgtttttaattttatgtccccaccagggcccaggtccagagagaaacattggaatgtgtggcttggcaagtaagggcgccagtggaggcagctgggcggcgtccctagggaggggcgtccctagggaggaccgtccctgggttcaagggtgacatgcaggttctggtttgtaccctgtctacttttgaaaacctcccacagcagaggcaaggtcacccctctgccccaagaatcacataacctcctcttcctgggcctcagtgtctcatctgtgaaatggtcataaaaatatactgtttgaaggaagagcagcccaaactcctccccaaagctcctccctcccctccagcagaagcccctgtggagcacctgcccctctctcctttgatctcagagcctgtcccccaccaccccagccatctgagtcatgagtcctgtgttcccagctcatctccccagccgtgtgggggctgcacatcctgtgggctccatgttcgctctgctcactccacaatctctgagcctctgctgtctgccaagtgctcgttctgggccctggggaactctccctccgcggtggggctgctttgtgctgtaaactgatcctgggcgtccagggtggcttagttggtgcagcagagaggcaaggggcagagcactgtacccccagctcagggcagcgcgggtcacctgggcaccctaggcaggatcttcaaggagagagggacccagggagggagagtgccagggagggaggcaggcaggaagagagcgggaggagggaggcctgacctggcctggcgttttgtggggtgtgggggggtgcatcaggagctgggtgagttggagccggaggtctaaggtggggacctgggagctcagaccagagcagccaggggaggggcggtcaagggctgtctgtctgtccggggaagcttgggttgcatcctcgtggagacaaacaagttggcaccaaggcgagactacctgcagccaggtgagaaaggggagtgggctggggagctcggaacaggccttgggagggagggagatgggcgtgagggctgaggggcagcgcaggggaagaaaggttggagggctagagagacacctcccctcctccccccaccactccagggcagggcaggggcagccgcgggctgggcgggagggctcagggaggaaggaggctcgggagctaaacgcggagagcacagggagaccccgggcagggcgggctgcactcgcggtggcacagggtggccgcggcgggtcccaaccgcctggtggcccctcgggcttagcacgcccgacagcactaacgctccggggccggcccagcaaatcttttgtccggggcggcgctgagccagcagggcgctgcccggtgtaaacggggacccgcggaaggggcggggcgcaccatggcgcagcgctcggggaaggtgagtgcgtccctcaaccccaaggaaaccgagtggggctccgccttcgccccctgtgctaggggatgcaggagggtgcacactgttgatggtgacaaatccaagggaagctggtttaatttcttaataaaatggggtggcctcgctactggcctggggcctctctggtgtggatggataggaaggtctccatctccactccttccttctgggattccaacccctcgccctgcagtcaggagcagggagggtgttcagactccctggggcttccttggggtgggggaggcttggcttgtcccacagccctccgccccactgctgcggcttctttgcccaaggctggcctctatggcttttccttcccagggtctcttcagggacacttagggctggttctctgaaaaatgttgagatttgagggagccccgaatccctttggtgcccagacctccctgaaggtttcaggggccctctaccagccgtgcctggtgcaggaaggacgggagacctggctctccctcgccctctccagtgcccctagcctagccactcccatgaagcctttggtctccaaggccacattccagagtgtctgggggtgactgtgttgctgtatcagtctgcatgggccaggtgatgcttcagtaacaaagggccccagtaactctggggtgcagaacgccaaggtgtctgcctcctttccggtgaacgcatgtggccacgcctgactccaaggggcctggaagggcaattctcgtgttcttttgagcgaactggagacactggtgaggcacaagcgaccatagtgatggggaacatcactgcactctggcaggacccttctagggccacagttcttgaaacccaaagagttactaaatggttgagattttaggttccacagcaggaaatgagtctggcgggttgttattgcttcactttgttttgtttcgggacaaggacaacctgtgagtgccacgtagctataagacacgatgtctgaactcccagcagggtgatggagctccagatctgatacatgcctgctacccaaaggagtgacctacaaaacacagagagacagggtggcacttataagccctcttttgcgaacattaatcccgagccaggccctgacgcggcttcggcccattcagcctctccagtgaaggaggcccaatcccaggaacccgaatttctgcaaaatatatgctgggttaccatgagagggttgtgggtgaaatttcttcttttgaaaacacctcctttaatgttattatcggctttatgttttaataattaaaaaatgagttaaaaatgcagtggaagttgaaaacagcccattttgaaatgggcacctagacaaaggggaaacccctgtccccaaatcgctgctgaaatttgtctgccccactgtgagctcctaagggtggggaggaacagtagctgtgtatggcatcagcctgccagctgttcgttcttttgcccaattggcaaatagtgttgggcacctactgtgtgcagcaggtctgggcttttgggggcctgggagtaggggttccatccagggtgttgggacccagacgccagcctccaacgctgacggagagaagcccctgaccctgagctctgtaacctgccctttctagatcactctctatgaaggcaagcacttcacagggcagaagctggaggtcttcggggactgtgacaacttccaggaccggggctttatgaaccgagtgaactccatccacgtggagagcggagcctgggtctgcttcaatcaccccgacttccggggccagcagttcatcttggagcacggcgactaccccgacttcttccgctggaacagccacagtgaccacatgggctcctgtcggcctgtaggaatggtgagtgggcccgtccaccgaaggctgagtcttcctgctggagggaccgagggtcagccctggcagacagtggcaaggaatcggggagcgtggtcctcccggctttaaagtctgtaagactgaaggagctatacccagagccacctgctggcatgaggtgagtaggtggggggccaagttgctatgaactgagtgggagtggccctgagttttcatacaggtatcaataaaccactttaagtttcggagccaaaaatctagctgcattttccatttaaaatgctgttgaaatcatccaaatttagatttccagccagataggggacactccgccaatgggaggctgatttgggcctagtgtggccactagtacaggtggtcttgtggcacattctggagccttccatgtcttggaatggctgatggaggaagctgaagaatcacccgcctgtcaggggaaaattggggggcaggtcccttggaattacacaggtagctgccgcccaagaggtgtgtgcagggagggcagacgaggggcatggctccccggtggcgaaagactgtttcggtccagctgctcctagggtgggatttaagcaaggccgttcccccaggtcatgggtactcactgacctgctgtgagctctggagcttcaggtggggagtggcggactcctgagcctgggggcgtgcatctctcatcacagagcgtctcgcttatgtctgctgaggaccctcccccgacgcctgggctgggtggttctggtgaacatctgaggaaccccagtaaaggggcctttgtgtggtgccccctctcttttctgtatcagttgcaaaaccagctgggctttggcatctcaaattgtaagaatgcttccttagtatttcttccaggctgtggtccatttggaaaaaagaaatttaaatggttggccctggaccctgcataatgctatttatatgaaaaacatccttggtatcttgcgaactgctgttctcctaagagctagcctggggccagctgtgacgcagaccaggccctgccggcttctgagccaggcaggggctggccctcctctgtcttttggaaatgcgggaatcatatagggagatgtgctgagcctaggggacaatgatgtcaaggccagcaggggtttcagcacatgagatctggtatttgttttagatttttggctttatgttttactaaaaggttctattacagttttaaaatgttatcatttgaaggcttgcccatgggctgtggcccaggggtggggaagtcagaacccggagtgtgtggctgtgatcagggccggagtcccccacgctgagcacccagagggagccccgtgaccccagccctggtctgagtgtgaccgctggcctctggtcagtttggccctctttggacctcagattttctagttgtagaaagaggagcttggaccagctcagtggcttggaacattttcagagtaatagaaccctttcttccaaccacatctcatgtggaagaacaaacagaagtgtggggttgaagtgtgtggggtgggggtgcccagtgccttgggtacctcctaattccttcctgcatggggcttctgtttctgggagaggggaattcacagcaacctccttctttccttcttttttgcttggtcttggagcacggagaacatttccgcctagaaatcttcgagggttgcaacttcacgggccagtgcctggagttcctggaggacagccccttcctccagagcaggggctgggtcaagaactgtgtgaacaccatcaaggtgtacggggacggagcgtgagtacaggccacgtggccgcaccccgaggcccggctaggcccttcagcaccaggcgtgggaggctgcccgccacacaggggtggtgggtggggtgggaatgagacctccagcagtgggcagcgtgtccctggccccacaggccctctcctttcctcagctgcctcacctgccccagtcaagcagcggggagcttcccctgtggcccagaagggcctcagagagggactctgggccccagaggcaccctgagaccttccctctagggcctcagtccaggagcagaggtaggagagtaccttgaaagttgcacggttctctgcgattgatctgatacaaggggccgcctttggttttcttgaaccgggggacacctgcttaccaaggggtcctccagggccttatgggctggaaaagccacagtgggctcacttgctctgagaagggtggaccagcccaccctgcccccgcgcctaccccgcagagctgacccctgaaccgggcctctctgcaaacccccaccaccctggcctctgggaggagatggacttcggggtggctcactcctggacagaaagtagctgggggaattttgcccaggcccagatgggtttgtctgccccacacttgggtttcctcctggtcaaccaagggcagcctgtgtgccccctcctgccctcccgcacactccccttttgcaactatcctctgagcaccttcaagttggccatgtattttcattgtccagcccacacctctaggtcaggtagatattatcgcccccgttctacaaagggcaagctgagactcagaaggctgactgcccggccgccccgtgggagtggcacagctgagactgcagccaagcctgtgtctgtccctgttccagagctagccgctttcccaggcctcagtcccctcccctcaggccaagagcccctcacacaggttccagctggctgtgcatggttctggcgcctatcgaagcaattgaggaacaatttgccgtctatactacagaggttcaaggccagggagcttcggaggggatgcagggggcagagggactgcagggagacagagactgggccgaggcagagctgggcacaggtggtaccccatgtccatgggctccaaccgcacagcgaaaatatccccccacaattgtgtctatgctgaatatgtacattattccctgaaagatactgtacaactatttacatagcgtttatgttggattaggtatcataagtaatctggagatgatttcgagtccagtaagtcctcacttaacattgtggataggttcttggaaactgtgactttaagtgaaacaatgtatggcaggtcctcaaatatgtcatcttgttcaatgtggattcattataaaattgatgaggggagaaatggctttgttatatatcatgtgcttaaagccacggttcccaagaacttactgacggtgttaagtgaggacttactatatatgggaggatacacatgggttatatgcaaatacagtgccattttatatcaggaacttgagcatcctcggattttgatatccaagggaggtcctggaaccagttcccagggatagggagggactgtgtacatcccacctttccccggtggcctgatgttggcccccttcctgctgtttctgtcactctagctggctccaggattccgttttacgaaattgcattttgccctaaattggtggcacctggagcccaggggtggcattccaaaacaagaatttgccctggaaaacttgctggctaaattgtgtcttgtaaggcccaagtcatgcctttgcgtggaggatgtcctgaggccctagacacaatccccccggcccacccccaacgctcaggggcttgttgagaacgaaggtggggaaggtggaggctaacatttctctgactgaggggcacacaatccccactgtccctgagaggagccagccatcgggaccccaggtgggggacccaggagctcagcctttgccgcctaagactcttactcttacacaaatgtaagcccttgtcaaggaggtaacgcccccaggtcccctcgatccggaggggacactgctaggaggcctttcctggggtcgggggagtgggcaaggcagggtccctccaccacctcccactgccaagactccttccctctgggtcccacatcagcccaggcatgacccatcccctcagacccgtgtcctggtgggctctcggagggaaatgcactggcgttctgcctccacctaccctcacctggggaagggcacggtgctgatgtgggcaggacaggcccctgccctttcctctgtctgcctcctcccagtagccacagccaggacaggggacagcaggatgggtggttccccgccccctccttttgggggtgtccatgtgagaaccctcatgtggcccaggacatggcttggggcatttcttgcccaccacagggtaggaaaggaccagctgactctctgaggtgcctctgaggccccagctgtggcacaggtgtggggttggaaagctgtaggtgtggaggggcatggatacgggggccatgagggtggggtccaggctggaccaggcctgccctgagtcccccagcaggtgctccaggctggctcacaccctctgcctctctctcttccttcctggccccaacccttgaggcagcagactgtgccaggcaccaggcatgacaagcctcactcgtctcagagatggtgagggaaggacagggttgggccagcccctgctccgagctgtcctgaggtgtcttccttggaccacatgcccctttccaggcaaaggccactatcctggacctccagtcccttcctcctggtcccccgttccctccccaccgcaccttcctgcttttctgggccgggcccacagcttcctgggtgatgaagagctgtgttctctcctgcccccaccagcccgaggtcctccaggctctgtaaagacttgtcctgactgtttctgctctctgggttgttggtggctgccccagtggtgtgcagaaggggaggaggacaggaaggggccctgcttgggactccccaaccctcctctgtgccctgcaggctcctccatgcaactgcacccccacagcccatttcctctgcaggggaggccccgtgagggcaggagggggcaggaaccgtgttgtgtgaccatggcacctctggtacctgacacagtgttgggcacacatgtgggaacctgctggcattcactgaatgaacggtgccctctgtgccaggccccccaccaggtgctgggggtactgtctgtgcaaggtggtccttatcagggaacaggagtgtgtggggcgtgcagtgatggcgggagtgcatccttgccaaggatggctgaaatgcagtggcgcaatctcggctcactgcaacctccgcctccctggttcaagcaattatcttgcctcagtctcccaagtagctgggattacaggtgcccaccaccacacccagctaatttttgtatttttagtagagacggggtttcaccacgttggccgggctgctctcaaactcctgactacaagagatctgcctgcctcggcctcccaaaattctgagattacaggcgtgagcccccatgcccggccaggactggtcagttttaaaatgtggacattactgggcctgtccccacacatgtcacaccccagcatggaccccacagggcactggggaaggcaccgtgggtgccttcgtgtagcccagagtgaaggggccgctcgaccgggaggggttgctgggtggccaggctgtgcaggcttttctctccggagtcccgggggacttcctggcagcccctgatccccactcccctggcctccaggtgggtcctgtatgaggagcccaactaccacggccgcatgtacgtggtggagagtggcgacttccgcagcttctcggactgggaggcccacagcgcacgagtgcagtcgctccacaaggtggtcaacttcttccagccgagccctcccaccgggatggccgggcgcagctctggggacaggggcaaccccttgcggtcccacccagacctcgggaccttgggcgataaaagtcctcaaagccaacgggcggcttctgagtgctctctcggcagtgggcatcccagccctgggaggagctggatgatccagggcgctttcccggactcccagggaccccctgggccagggaggggagagtggtggggagaggtggtgagaagcaatggggatggggcagggccggaacccaggccggttcaggactccccaggctcgcttggggctctgcctctctgtgactcggcaaggtgaggctgccaggccatgtggccaaaggcctgacccagggtctctgtgtctgatctctgggttttatcctcatggctaatcttggcctcggagtttctaagggagacccctctggaaggatggtttcgacccagggcagacccctctcctgcgagagagaaaacagttagtggtggtgagtgtcagggtgggggcttagcttgaacaggtgggctctgtgggaatggaggggctttcggggagaaaggggcatggggcgtgtctgctgcagccatagcccctggagcagtagggctggcagacccagaaccggcggctcgcgtcttcagctggtgcagcaccaagcgctcgcctgtagaattcctccattcctgggccctctccaggacactgggtcctcctgttggggtgggcttgaatctagaggggacaccccacccttgaggggcagaggggagggagaagtctgtcctggaaggagatactcggcccaggcagtgggattcctgggcataagaggtccacgtccccaaaagcatccccccactccctccccacccacgcctatgcttccaactcactggggagagaggaaaggtcccacgaggggaactctggtccctgggggtggcccaggtaactccctgctgccggcagccctccagcagagtcctgaatggagcctgcctgtgaggaaaccatagcccaccccagaaggaggcaacagatggagtgctctgggcttctgaggagaacacaggggccctggacccgagattcctgagcatgggggctcctggacatggagaccccaaagatgtccacatggcctgtgcctggaccaaggcctggctggatgagggatcagtggggggccaggtgcatgggttggatcacccgtgtgcccacagagttctggctgtggatctgactcctggtccagcctctaatccccgactgcgatcccagagtccccccaaccaactggctcccgactggcctctcagttcccgggtcctcctcaccatacatcttactccagttttctgagtagatggaggggtttggactggggatcagcccctctaggctggtcgcccagctcaggactccgagggaaagcccatgagccctgggttactatctgagttgaactgagacaccccgacaggcctagggggtgatggagtacggcagggagctcagcgagggaacacagggttcccgagagaaaaacaaaatctcaggggctgattctgtcgcacagtgtggtggcctgagtgtggtgggccaggggatggctgtcccgttcctgggtgtcctccaacctctccccatccctcactgagagagcaatggaaaaagagtcacgatgggtcacccaattcacccaagacaattccccaccaagagctgggtggcaaagacggaggggccccatgactgctgtgggacccccgtaggctgtcccatgacagccgaggccaaatgaagacatgaaaccactaggcaaccgtccactccgcccaggaaaggggaaggggctccctgctgccatgtggtagatgggtccccaaaaggcctgctctgtacccctaatgccctggccccacctcctttcacctgcaaaccacagagcatggagccctagaagcttcggagctgaggacttccagctgagcagctctcttcaatcagatcaaggaccggaagaggccaccacaaaaccagcaacaacccagccacctttcctgactgcaaacctctgagcctggaaccgattgacatgtaaatgcacctgcaccgtttctgagccgggagagtgtttacttaaaatcatgccctcagttttcatttctctgccagtttgttagggaggtggagccttctgtgtgtcatatctgccagcgggaggccctccccacccatggcaagggccctgtctcttctgaaacagccgtccaaccctccaccccacagcctccttgggccttggcaccctgctggcctcaggcctccacaatctcgcacctcagcccacagctgatgatggtgatgatgttgatgaatatttatggagcactgacttaatgccaggctctgtagtagctggaatctgtgtaattttacttatcatatacaataatgccaagatgatatgcttatcaccactgtacagttgaggagagccagccacagacaggttaagcaacttgcccagggtcacacagcagtcaggactaaaacccaggtctggctggctgattgatccttttcgttcctaaccactcctctatagagcaccacacatttgcatatttagatatatttttgtcatgaatttggcgcaaacccaaagcctctccaggcctcagaccctgttctgtgaaatgagtgcaatcatgtctgctgtaccaactgtatacccttgtaaaagccaaaggcgtgacccatgagcgggtgccatatgagggctggttagtagtaggtgacccagtaggtgacggggtggggaagcaggcaggggagtggcatcacaggagagaaggtaacttggctccaaactccaacctgattcccactccatccctcactaggatgtgacattggagaagccactgctgtgtgtctcagtgtcttcagacgtacagcagtggtaatcattccgccccctcataggcaattaatgcctggggaatgaaatgagaactgcaggccccaccggttcagtccaggtccttgggagtcacgggaaaaaccaggcctagcagcccttcccatgagttccagaggcttcccctgaactcttcctctcctccccagcaccaaggcttagcagcatctcattaactggtgatttaatgcttctcgaatgggctttgtgctcctgggtgacctccccctcaccccagccccctgctccctaatctgtcagcaaatctgctttttgtctgaaagaggaaaaacaagattcccaccaaagtgcttgtgggcagcttgtaatttatctgaagtccgtccaggggtcgatggaccgagggtgagaggccctcaagagccacacatgcttcacatatttctacctccctctgtggtttggaaagctgggactttcacagagccatcccctcatgtcctcagccctaggtccccctgccctgctggccccccgtgcactgtttatcaggcccagtctgaccacaggaaaaacattccctttgaatccccccagccaccccatcccccgcaccaagaagttcctctcaccagccaagggctggtccaagaagtctctgttggccccttccccttcctgggcctccctcccatgccccgaggtggcctgcgcctggcaggctaccgccttcttggctggaggcttcttggctcacctcttcaccccactgggtgccttaagagcagggctgtcctgcctgtgttccccccaggaagccacaacagatcttcaatcaaagcctgttggatgagtttgagcccagggacgtcaaaaaaaaaaaaaaaaaaagaagaaagaaaaagacaaactaacaaaaaacttgtcaaatgagacagttttaaaggtttagctccagagtttcagtttgtgaagatgacagacttctggagacagacagatggtgctgacggccgcacgactatgtgtgtgtacttaatgccactcaaccacacacttcaaatggttaggatgataaattgtatgtgtattttgccataatcaaaaaaaattaactccttgttgctgaggtgctcaggactgttgggggcaatgtgggaatgaaggccctcgctggatcccagggaaccctgtgggtctcctgtgcgaccatgccccacattccctacctgaagaagctatcacctgcttattgattgcgtgggtcccatcggcttggcagggctcttggctgtggctgctggggaggctgagatgcaggaggaggaagaggaggaggaggagaaggtccttgtccttcagcagggatccctggagcgtccctgtggttacctgggactaaccctgccttccggacccccaggacttagtagcccaggtctggggacaccaggaaggggtgacttgggcagcctgccctgaacagcgagcatttgtgtgaacaggctcctggcttccttgcctgtggacagcccgctttggaattgtgatttaaaaggatcctgtggaacccagctggcgtgggctgtgcatggaggggtggaagccctggacccagccttgctggggctgggggatggactgggcaggtcagtgctggtaacgctagtcctggtccatgcctgccctgggacccccaggactgccctccctgggtaggggcaggggcaggggcagagggtagggctgggctgagggtgcgcattctcatcccgaagagggctcagcgatgtgtaggattgctctggctagggggctgagcaggttataaggaccctctccacgaaccctgcctggcccccaacaccaagagcgggagttctcaccagttgggctggatcgttccgcgggctgagatggtcgtgccctgggttccattcccgtaaagtgttcatttctaggtgccaggcacagggagcagggcggcatgtcccccgcacagtgtgcccagcctaagcaccagccctggcattcctaaactgcacagacagacatgcgggcagtagaaatgggcgctcccacccagtggggctgctgggtagaagtcccttcatggggctggtgatggccgaggtggtgtcacctctacacacagaggggacgctcaagtgttgctttatccttggaggcactgggcccaaggccaggggaggagcccattgtgataaaaacgcagatacaaaaagtaggggaagaaatctttgcggcagaggggacttagaaaaatgttgtagaaaaaagcgaggcatccataatattctccccgccacaagtcctgtgctgtctgctagagaggaactgctaattgggccaaagcaagcagggaaacaggatcagctccatcattcgctcagtcccaaagatgaaaggaagctagttttccggaagaagcccagcaattcctgggaccgaggccagagagaagtttcttccacgggtcctctggccccatgccgatgactcacaagctgcaccctcaacgttagccctcctgcggggaaattaacaggtttcctaggattttctgtaatagcatcccacaggattcggtggacggcactgtgccaaagtcaactttttgtgggggaggagattttaacatttctggtttacgtatgagtatattgctacttttaagtgaacctaattgggtcatgaaagcgggacctggcaatgaccggttatcagtagataccaataccaacagcattttcttgggtaattactatgacacaaactgtgtgctaacccattttttacatataacaaggtgggtatattattttctctcttttacaatggaagaaatagacctaaaaggatgattgtaacttgcccaaatgtgtgccataaatggccaaaaaggccaagtgcccctggccgtctgaccccagcccacacctaaccccctctacacatcatcccctgtggcaacggcttcccaatctttttgactgagactcacatgtaggtcattagatataaaactaacacagctgtgtcacaaatagtcccgatcctcactatttagttgagcatcaatattttctattttattttactttaaaagaatgctggtcagagacccactaagttgatttcgcaacctcctagtaggtcacaattctccagtttgaaaaacactacaccactgcctcatagtgtaaacaaacgaagatttaaggagccacagcctacgctgtggattagctcttccaatcccagtgccctcctccctcccttgcctgccttcactaaagcatccagaaaagccaaatgctcttttctctgcctcccaggccatgggacatagctctggtcactgagatgaaagctgacagaaggacttcagaaaaagctttggctttctggataaaaagcccctttcccctggcttcctgccttgaataaagatgtgacgccaggaactcaggcagccttcttgtaatcatgagataaaagccaagagaaccagggaaaggctggcaccaagctcacagagctgctaaatcagcatcagcagccacccttcttgttatgtaagagaagtgaacccctatttgtttcaccacacgtaggttttctattatttgcagctgaaaacattcctaactaataacataataaccaaaaacccccaaacctcaaacaggtaggtcctcctgtgttaaaccctgtgcttcattgtctggtgagcaataaaggcacttgcacttggaaatactaaaatagattttaaaaaaccaacctattaaatagttcatctatttaaggtcgtagttcgttttttcccaattagaggcactgcctgccctgtggcatatattcaatggccacggtatcctgaccgtggctaatttttgtatttttagtagagatggggtttcaccatgttggccaggctgatctcgaactcctgacctcaagtgatctgcctgcctccgcttcccaaagtgctgggattacaggtgtgagccaccacgcctggcctatttgtttctgtcatggagcaaacccagattctttggaagagagttttgtgggatgtggaaatggaaaacaattgcatgggaatgccacattcggtgtggggcctttatgaagaaacatgtgaaaggtttccagaagagaaggcaacatgattcacgttggaaactgcagggctgtggtttagattagagagagaaggggccgggtgtctggctgctgtaacaagtctctatgttaatttccaagtgcatccctatcttcatttatgtttgatggttacctgtcaggtgagcagaataagtcttgttgttcctggttaatgaaaaaggaatcgagaccctgagaggtagaggggtttgcctgtgtttacatcgtaggtctccatggagcagtccagacctcttcccagaactcatgctggccttgctacccagaattcctgcctttagggaatgacccttcccctggccctgccttggttctggtgtgtgtgcctcaccctcaatgccctgccacatgtgggctgggccagtcagatgcactcctgggaatttgaatcttacacagagacacagaggaacccaaggtggatagaggcttgagccgagtccgtttctgttacctgcacaccaaaaaccctaactgacagaaatttctactagacagaaggttgaaggccacaggccagcagaaaaatgtaggatatttggaattagttattgggatctagatgagtagagagtagttaaactcccatttacattctggtgtggatggcattatgggttgacaccataacttatacattgaagtcctaacccccagcacctcagaatgggactgtcttgcaatgcacttagttaagttaggatgaggtgtgtcttagtctttcaaactatcgtaacaaaataccagagactggatggcttaaacacagaaatgtatttcctcatagctctgaaaattgggaattccaagctcagggtgctggccaacttggttcctggtgacgggcccccttcctaacttgcagttggctactttttcgctgtgtcctcacacggcagaaggagcacaagatctctctcttcttcttatgagattaggtctccacccttatgatctcatttaagtttaattagctgataaagccctatgttcaaatacagtcacattggagtttgagctcggatacatcaattttgggggtgcacagttcagtccacatcaagatcctactagagtagggtgggcccctgatccatcatgactggtgtcctcataaaaaggggaaatttaattagatgggcgtggtgggaggcacctgtaatcccagctactcgggaggctgaggcagcagaattgcttgaacccaggaagcggaggttgtagtgagccaagatcaccattgcaccgacaacagagcaagactctgtctcaaaaaaaaaaagggggggcgggatttagagacagacacacacacagggagaccaccatgtgaagataaaggcagagacccaggtgatgcttctgtgagccaaggaaccccaaagacggccagcaaaccgccagaagctgggagggaggcctggaacagattccttgaagcctcggagggacccaaccctactgacaccttcatttatttccgacgtccagcatccagaactgtaagacagcacatttctgttgtttgagccattcaatttgtggtactttgttatgacagaaatgaaaggggagagctgcctgtggtacagacgggccacatgcctagtcaggccaccctccgtggccagctggaaccaggtgtgcacttgtaatgcccaaccttgtttttactaaccctgtttttagactctccctcttccctttaatcacctagccttggttccacctgaattgactctcccttagctaagagagccagacagactccatcttggctctttcactggcagccccttcctcaaggacttaactcgtgcaagctgactcccagcacatccaagaatgcaattaactgataagatactgtggcaagctatatccgcagttcccaggaattcgtctgattgataacgcccaaaaagccccgcttctaacaccttataatagtcttaaagcctctacacctggaactgtttactttcctgtaaccatttatccttttaagttttttgcctactttatttctgtaaaattgttttaattagaccccctcccctttctaaaccaaagcataaaagaaaatctagtcccttcttcagggccaagagaactttgagcattagctgtctcttgaccaccggctaaataaacggactcttaattcatctcaaagtgtggcattttctctaactcgctcaggtacaacacactgaggcagggttttgagggtcgtacagttgctgttgcaacataattttaaaagaatgcagaacgcagctgacatgtagttgcctctgacagcactggatatttggatgcacatcaagattaaatccgacaaagctcctctcaaggtggagagcagaactcaaggccttcctgtgaccagtctaaaatctcattagggacagagtttggagacgaatcctgtaggttgctaaatgaaaacgttagttgtctgcatgaacttcccagagatttgatgtgaaatttaaagcactaacacaaaaagaatgagacaccaaccattggaacggggatatttgggagtatttggaaaactagaacctccagatcccccaagtcctttaaaacaccccccactatgttcctcttacctgagaaagatgctcctcttttgaaggagagaattaagagttcccttcacagcccactatgtagcgttgcttgccccataacaggagttcagcatgtgtggcttagactagagggagaagtacagagagacctagagaaactgccagaggtcactcatccacattgccagaagtctggagaatgtttgtgggaatggatttttgagggttcttggccaaagagggaagaactggattctggcttgcaccaagggtattgataagacaattctgcattctgtgtactggcttagggggtgctgtccatgtcctaacaacctgctgatgcaaagttgatggtgttgaagtggcgcagaaaggctaggaacccttggcataagagagggactggttctgagctgtgggagacaagatgctgaaatagatccttttgtgtgtttccaccccacccaccccttgggatggacctcaggatggaatcaggcgactcctccaccctcagccttgccacaaagagtaaactgccatggattgttaatgggagggacagtgatagaagggggatccccaatctctgaggggtgagaggagcactgggagctggaggtcttcactccggaagtgcactgggtagggctaagtggagcctggatctcagggagtcgtctcaccttccaaaatctcaggtcatggatgattgacaggtatcccccaaattaagtcggtaatcaatccactcatgtccccctttttttgtagactcaggaaggttgcaagaggcccaagtagaaccagcatgctagagaaccatggcctgttatcaaattcccagacccgggtcagcccacagacctggcaccctttgaatgtgaaggccaggcatccttgaagagggcagctgctataatatcacatgtgtattctgactttttttttttggggggggacagagtctcactctgttgcccaggttggaatgcagtggtgcaatcttggctcactgcaacctctgcctcttgggttcaagcgattctcctgcctcagcctcctgagtagctgggattacaggtacatgccactgtgctggctaatttttgaatttttagtagagatggggtttcaccatgttggccaggctggtcttgaacttctgacctcctgtgatctacctgcctcagcctcccaaatgctgggattacaggcgtgggccaccatgcccagcctttctgtgacttaactttaaaaactctgacctttgagccaggtgggtgctcatgtctatagtcccagctactcgagaagctgtggtgggaggactggttgagcccaagagtccgaggctgcaatgagctatgatcataccagtgcactccaaccagggtgaaagagtgagactccatctcttaaaaaagaaaaggtaaggtatttaagccttctctccttggaattaaacttggtgcaaaagcacactgggaaaaagcaggctggagccaagtccacttgcagcaacatcgtggagatgattccacaaggcccagctgccgagctccctggcatctccctagtgcttatccttcaaatctggatatttatctctatcttctcttgctctcttttcaataaatccatttttcttgcttaaactcactaaactcatttatttcaccgcaaccagagaatctggatggttcccactttctccctttttctgctcccagcaacataaaggcgggtgtggagtggatggccccaccagccctggctcccactaggaaggacactgaactcacacaaaataccctttgtaggattagcaaccccagcactccttaagctgggcttcagaatccacacaaagaataagcaaaggcataattttgtgggcagttagaaatcctatggagtgagtggaaacagacattcctgcatggggctccctcctcgtccctcccagtcacacacacactctaaccacggtgccttactgtggcagataagaacaaaagcccctttcaagacatgtggtgcctatgtgcagaaggtctgagatctccatctgggctgggagaactgtgccaggtgccaagagccttgccgtggcttgcttgtctcggtcctcagaaatgcactgagaatggaggaagcggtcaaggaagggtcttccaagtcctttggattttctccttaacatctggtatctcccaggtctgaggctggaaggatttgtgatatttttcccattctgtgggttgatttttcactttcttgatagcatactttgaagcacaagagcttttcattttgatgaagtctgattttttttccttgtttgcttattctctaggtgtatctaagaagtcattgcctaatccaagattaagaaaacttacacctgtgttttcttctaaaagcattagagctttagctcgtacatttaggtctttgattcatttttagttaatttttctatatggtatgaggtagaggcccaaatgtatcctgcatatggctatccagtggtcccagcagcattttttgtaaagattactctttcccctgctgaatggtccatacatgtctgggctctcaattctattctattaatctatatgcctatcctcatgccatacattgattgacttttggatgttaaaccaaccttgaattcctgggataaaccttggttaccatgttttattgtttttatacattcttgaactcaattgctaaaatttttaaaagaatttttgcatctatgctcatgataaatattggtgtgtaattttcttatttctatttttatttattttattttattttattttattttattttattttattttattttattttattttttgagatggagtcttgctctgtcgcccaggctggagtgcagtggcacgatctcagctcactgcaagctctgcctcccgggttcaggccattctcctgcctcagcctctggagtagctgggactacaggcatctgccaccacgcccgactaattttttgtatttttagtagagacggggtttcaccgtgttagccaggatggtctcgatttcctgacctcgtgatccacccgcctcagcctcccaaagtgctaggattacaggcgtgagccaccacacccggactttatttattttttgagacagggttttgctctgtcacccaagctggaatgcagtggtgcgatcacaactcactgcagcctcaacctcccaggctcaagtgatcctcccacctcagtctcccaagcagctgaaactacaggaacatgccaccatgccagctgattttttaaaatgttaatacagatgaggtcttgctgtgttgctcaggctggtctcaaattcctggactcaagtgatcttcctgccctggcctcccaaagtggtgggattacaggcatgagtcacggtgtccagcctataattttctttacaaataatgtctctgattttggtatcagggtaataccagcctcatggaataaattgagaagtgttcccacctcttcagttttctgggaaattttgtgga

SEQ ID NO: 952 - DNA, 697 bp, Homo sapiens
atcactctctatgaaggcaagcacttcacagggcagaagctggaggtcttcggggactgtgacaacttccaggaccggggctttatgaaccgagtgaactccatccacgtggagagcggagcctgggtctgcttcaatcaccccgacttccggggccagcagttcatcttggagcacggcgactaccccgacttcttccgctggaacagccacagtgaccacatgggctcctgtcggcctgtaggaatgcacggagaacatttccgcctagaaatcttcgagggttgcaacttcacgggccagtgcctggagttcctggaggacagccccttcctccagagcaggggctgggtcaagaactgtgtgaacaccatcaaggtgtacggggacggagcgtgggtcctgtatgaggagcccaactaccacggccgcatgtacgtggtggagagtggcgacttccgcagcttctcggactgggaggcccacagcgcacgagtgcagtcgctccacaagctcattaactggtgatttaatgcttctcgaatgggctttgtgctcctgggtgacctccccctcaccccagccccctgctccctaatctgtcagcaaatctgctttttgtctgaaagaggaaaaacaagattcccaccaaagtgcttgtgggcagcttgtaatttatctgaagtccgtccagggg

SEQ ID NO: 953 - protein, 167 aa, Homo sapiens
KHFTGQKLEVFGDCDNFQDRGFMNRVNSIHVESGAWVCFNHPDFRGQQFIHGDYPDFFRWNSHSDHMGSCRPVGMHGEHFRLEIFEGCNFTGQCLEFLEDSPFLQSRGWVKNCVNTIKVYGDGAWVLYEEPNYHGRMYVVESGDFRSFSDWEAHSARVQSLHKLINW

SEQ ID NO: 954 - DNA, 135050 bp, Mus musculus
  misc_feature (1)...(135050): n = A,T,C or G
ggatgcacaaacagacccacatacatgtggaggattgattttttttttgacaatgatgctaagaacatttatagagggcagaaagtgtcgttcaacaagtggtggtgggacaattggataaccacatgaataaatcaattctgagtcaatccttgaaccatttattaaagaaattctccgtaatgaatgacagacatgtatgcaaaagcttaaagctgggaaacttacaagaggaaatggaaaaaaaagtggtgtggccttgggttaggcaaagatttctgagatacaatagcaaaagcataagatattgctaaaaaattaagtgacaagagactgggataaaaaaatcccattggtgtatgaatatgtaacgtaaatacataaaagtgaaaacatttgttgttcaataagaaaaccaagcaattagaaactggctcatgggttgaattaacctgaagataaatgagtaccaaagaagtgcctgaaaacagactacttattgatcacgcaaattaaaaattcaatgacatggcacacacctgttggcaagtcaaaaattaaacagagctggagagctggcacaggcagcgaaatgcttgctgtgtgggcacaagacctgagcccacaaccctagtactcacataaaaagccaggcatggtggtgtgtgtttggaactccagttctgagaggcagagtcaggacaaccattgggtctttctggatatctaaatgaattggtgagctccaggttcagtgagagaccctgcccaaaaagaggatggagagccatagaggaaggcatccaacatcgaacttagagcctacacacacacacacacacacacacacacacacacacacacacacacactaagtacacagacacaaatgtatacacacatatatcacacatatatacaatcatgaggacctcagtgtggttcccagcacccacataaaaaccagggttcagcacatctgtaattcagcacatctgtaattaattcagcactgacagaaacgtggatctctaggttcactgcctatctagtctagtctagttggtgtgccccaggtggcaataagagaccctatctcaaaaaccaagttggatggcccctacatacacactaacatgtacacatgtccatgcatgcacccaaaagagaaagaagaatgaaggagggagcaggtgctggcaggatctacagcctggagatgtaatctataagatccctctctctctctctctctctctctctctctctctctctctctnnnnnnnnnnnnnnnnnnnntcatttgtgattgactcaatgcagggctgatcaaactctaacaaagctatttgcaagactaccaagaaaattccaaaatgtatatggaagagcaaaggtttaagaatagctgccaggctctgagaaaatgaacaagttggggacatgcggtcatgggtgggtgtgaccgtgtggcaagagacagagtagacgaatgacaggagacaaacagaattgtgtgagagggactcagtgtgtatcacagtctggacacgagatggagttgtacatgctgacactgttgttaatttcttccagtgaagacacactcacactggcctcacaaacctcagttctgagccagggagctggatcagcaggtaagggtgctggctgcggaagcttggaaactcgagtttaatccctggaacccaggtatagtggctgttcctggtggtcaacttaactatatctggaatgaactacaatccagaattggaaggctcaccagtgaccctaatctggaggctgggagatagaagtttctgccctggatcttggtatggagatcttgaggcatagtggctatggattccagaagattaagacagggagatctccgagttcaaggtcatctgggattaaaggtgtggtggaacacacctttaatctgggttacaccttctgctggagaccatataaggacattggaagaagggagtctcactctcgcttcttcacctgcttgcctgtgggactgagtaactgctagatccttggacttccattcacagctactactgaaccattgttgggaattgggctgcagactgtaagtcatcaataaattcctttactatatagagagactatccataagttctgtgactctagagaaccctgactaatacaccatataaagtcagaaagagagatctgactccacaatgttgtcctctgacctatacacatgcgttgtcacacacatatacccacacacacacacaccacaccacacacacacacatacatacacacaccacacatgcacacacacaaacacacacacatacacacactgatgaataaaaatgtgtcaaaccctcagtgccatgaccattaatctttgagatgaaaaaaataaaacaaaacttgaaagcaccctgagggaatatgggcgtatattaatgttattgcttcaagattgagaacatattaaaacacagaatctcagatcagagaaaatcgttgcaagcatggactacattgaaggcactgttttcattcacacagaggaacccataaggatatgggagaagacatgtgtggagcagatctcagcccagcactggcatccagaaggtgtgggggatacaattggaggacggcaaacatttcctccaaagctgctacgtgataaactgccatgcctgtcttggagggctttttgtacagtgaagttgatgatgttcatagccctgtggactggacagcccttccactcatgtaacagacacacttaatcatggttccccttgggggcaacttgatctcctgtaaagatacagtgttgatatatcacatggggaagacacttggcacttctggggtggaggctgaagatgctgccatgccttgttggtgtacgacccctgctcaagaacctgcctctaaggtcaagtgtcctgctctagaggaccatggtcagaaactcaaatgtttaagttgccttgttcaaaatgatgtctttcctatccacagggaccaacaaaattatggattttaaaagatcattatcaagttaaaagtttaaaaaatggattctgtttatagccacaactctccacacatggaatgagaaagataacacactaaggagagaggcacagggatggggcctatggtgtatgtgaatgccggtcccttaattcgtagtctatatgcttgaatgcactaagatctataagagaaggtaaatttacagtcatgtccctgccttgcccctgttctcatgaagggcaatgggagctccctgctgtgaggggcagagacagaaggataacaatttcttcagggctgccttgggtccatacctgatgacttgtatagtatgatctcaccgtctttggcttcattatttttactttcaaggcagaactgactttattggaagccttttacccgcctttggagaaggtgttggtgacatgtctttcctggtatttctgcaatatgccacatggtaggaaacttttccacataaagaattatgggattgcctttgtcacccaactgtttatatatatatattagattttagttattagaagatttattattttattttatgtatatgagtgttttgcctgacagtatctctgtgcaccacatgtgtcctggttcatacggaggtcagaagagggtggcaggttctattccttcgagctgcagttaggaatggttgtgagttgccatgtggacacaagtctgaacccagatcttcggcaagagcagcaggtgctcttagccacggagtcacctctcctgccatccctgccccctctaaatacatgagggtctattgctctctgaggtcagaagagggcatcagatcccctggaactagaattacagatggttgtgagtcaccatgtgggtgtcaggaattgtacctgggtcctctgcaagagcagaaaggaaggaagacagaccctccttctcggaggaattctaccaagaactagcccagagctgcactccccacttctttctcagtgtttttcctctgcttagagttcctgacttcttgcctgtttgcatgcagcctgtctattttatatatccggtctgtctgtcctaagctgccttcttgtgactgtctgaacaaaaggtttcatttctgtatttattgataacacagaaaacatgatatgaaagaacaatgaaaatgaggaattctttacagaaatctttaacagggttttacaaagcaagaagtaacttggttaactcagttaaccctgagaagaactcagaactgcaaacagatattatcaacctgtatctaaacatttgtgggacattggttaaggttgctttcaatgtattggctgcttcccgaaaacgatgaccacaacacacaagtaacacatatacattgttctggggatggaagagtatgtaagataaaattaaagctatgattggtttagcttgtagaagggatagtcagtttggttacattgttcccttcaagggaggttaatcttaacatctaagcacacaatagcagagcaggttaagtcttgagccatctcaaggcataacattaatttggatgcaaggtccagtgaaagttcagtctcttttaaggcaaaagatagttttagaaaatgtgtcactacagactgcacagtaagtttaaagccagcctggaatacgcaaggcactatttcaaaataacttacagggacagacaaccctttcctggtgacactgcagcacacagtgacatgggttgatggtgggaactaggaaagcaagagggacatggtacagggtcctaggaacagctattaagaacaaacttcgccgggcagtggtggcgcatgcctttaatgccagcactcgggaggcagaggcaggcggatttctgaatttgaggccagcctggtctacaaagtgagttccaggacagccagggctataccctgtctcaaaacaaaacaaaacaaaacaaaacaaaacaaaacaaaaccaaagaacaaaatctctacctagaagctgacagctgtctctaggaagacgttcccctgaaacagaaattctggcatgtatggaagagtgtttcctgtcattgaccctggctggcagcagtgaagatgctggcgtccaagaggaagtgctcagtagtgcggagcacagcccatcggaagatgaattagagaccctacagcactggagggaatttcctaaggtgctgatgtgtgtgcagagggagaaccagaacaatacggctaatgtctcagcattagaggacttacctggcctatctgacattcaagttcccccagtactgacaacaaacccaaaactagccaggctgtggaggtgagtcacctgcagggtgtgatgggagagtctgtacttcacagaaagttctgtgcatgtgtttgcatacaaggagagtcactgagccaaggtcaccaagtgtttgtgaacttatcctgggaggtaagattgaaggaggccttcatgttcctttccataattgcctgcgctgtttaaatcttttcacgagactcatagaaagcaagcagtacccattcaaaggcaagaacccaggaagcattgtcctggcagaggaacctgcagctgtcagcatgtagccacatggcccggctctgagggtcaagctaggctcacacactcctgaggctaacactcctaagttttggaggagagcctgtatccccctaaccacacctccctgctccaggggggtggggggagccaaaacccctctgtgcagaacaagaacctccgtgaacaaccttcaaggttatcaaaggatgatcgattcttttaaaagcccattctattttgaggtaattgcagagttgcccacagttaccaggcactttctggttctccggatcctctgaactccttctcccatggaagtcacacagtggccctctgaacttttcataaggtacctctctgttgggaacactttgagtgttactgggtgtggctgagccttagactttagggttgaatgccatacaatacatggccaggggtgcagttttagatactaggtgtgtcctcaggtgcttgctccctggatccagcttcctgtcctttactaggatagcacagtggcaccttcctcaccaggtctaactgagggttatgcagcagccacacagtggcaccggggtaaattcaccttcaagcttgagaggttaagcatttaccccttctgacacctgggatggctctcatcgctttgtgtttgcagtattgtgtgagcttcattgcctgttgttgtgatggaaaatacccggggcaggatcagcaggtagtcaccgtgtgaatgtaggatcagcaggcttcagagagcacagcagagccatggtctgccacagggacctgggggagcttggacacttgagttctttcttcctaggtggcagggatgggaagtgctgggctgctcacattctgcttgcatctattagatgcttctcctcatgagagttaaaagccactcaggccgtcacatgctcactagcccatcactctggaggctggggcagggggactgacatgaattctaatctagatgcaagaagaatatttattttgaataatttggggtcagagagatggttcagtgtgtaaaataaaagcacctgacacttggtctgatgatatgagttcaatcctcagaacgcatactgtaaaaggaaagaaccaactctcatggtagtaccacacacacacacacacacacacacacacacacacacacagagttaaatttttatttagaataacaagatacaacaaataactttaccctaagcattcagtcttcaagtcttccctagctttcaagcaatcttgaaaatgtgcacgtccctcgtaatgagtctgagtcaggagaaccttcctatctacatccaagtttcctctactggagcctggtggtggtggctgtggcacacaccttaatctaagcagaggcaggtagatctttctgagttctaagacagccctgtctataaagtgagttccaggatggccagggctacacacaaagacaaactctgtctcaagaaaacaaaacaacaaacaacaacaaaaaccaacaaaatttttctctactcttattatagaactctaaatgatctatttctatgatttctgcatagaaaaatgttaccaaatcattatcccatgaagtcactcaaaacagataaagaaggatgagaaggaagaggaggaggaggaagaggaagaggaagaggaagaggaagaggaagggaaaccaaccaaaagatacttctataatagtggctggctgtcagctaagtaattaattcaattaatactggttttctgagtcttgtgtcttgttatgtttatggcttctagctgcatgaaacaaaatttgttgtatttcgttattctaaataaaaatagaatacatgtagcacgtagagacatacatacatgtgtatgtctctacatgtgtctatgaatctataatgtatgtgtctgtgtttgtatgtgtagtctctctctctctctctctctctctctctgagtgtgtgtgtgtgtctgtgtcagaaccactgtgggagttggctttctcctttcatcatgtgggtctcaggtcatcagacccagtgacaggtgttttactcactgaaccatctctatggctccattagaaaaaaaacattatcttttgcacagaactttgtaattcttattcttcttaaggagggctcctgatttcagaagctctgggcatcatgaaactcacacaccacacagacatccgttcacaatctactcttcttctcttacccattatcagaaccctgtgccattgttttttatcatgcatctgaaaaaaaaaaaaacaacaaaaaacctcgtttccttaaatcaaaaagaaatcctcctctggagtcagaggggttgtgcaatgatgttttggccaaacatattaaataggatcctccagaggagtttccagaaaggctgttgcaaggagctgtgggatgtgtcctgtgcattttgaatctctctctccagtctggaatgaagacaggatacaggaagatgggtgtcaccttgccaccttgaagataacatgaggaaggaaatcccatgttgaggaggggaggacaggggaaagggagggctcgcttgccttgggtttcttaagtgaggaaaagcatactgtagaacaggcttcagataacttgtggccaaaggcaatctgtaactgatacacatgtatcgaatcagggcaaactcagtggccctagtaacagaaacttactatttttgttctaagctagaatggctacctcaagccattcaagcccctctgcagttctcagaagcctccctctgctccttccccaagttgatgtttggtgttcctgcgatgccttcaggttcaccaactatgtcctttctgggcacttccctgcacccattttcataggaacaggagtcagactggatgaggggccaggctactccaggataacctcatcttaattaatgagacttgtcaaggtcttatttctaaagaaggtcatattgtgaaggagagagagagagagagagagagagagagagagagagggtagggggtggggggcagactctgatcattcccgaaacacctcattcctgttcttctttcctggctgtgttcctatgacatcacccttcctgtcgttcctgttgctaccaggtccccattttggaccatgctctctttacacctggtccgttgctgttaatgacatccttggagtccctcacattctgggtcttcccccttcagttctgggaaggtctgtcctctctaaagtcaggcagaaccatgtgtcttacattggccaatgaagtgcaaaagcatgcggtgcttttaaggtgggagggttggtttgacaaactcctgtatcaggccacctttcctttacactgctctgcaaattgtgctccttctgacccagtctcataagcctgacctgtgacagctgtccatcagtagagcctccgctgattcaagcaggatgaagagtgcaggcaggaaacaagccagtgagattccggctcgtttgttaccgcagctcagcagagtttatcctgactggtatatttaaaaagtgtgaatctgatagtagtttttcccaaggtgagacaagcttccgggtaatctccaaaggctttctcgtagcccataagacttcgtggtactggcctctgcccattccttctttcttacctttccagtcttctctctgccttgagacagtcttttttagactgtcaaatatgccccattgtcattaaactattccctgggcatggatgctcttctccatttttgcttgtttgtccattacgttgtccttagatcttagggacagcacagtaggtcctcaatacatatctgtagacctatactaaaccaatggatctctgcctagctaaaccctatctttctgcaagaccccggttgccatcgcattgtcatgaagtaggtgcggttttactcaatgatggagacgtcagaatcgttggaatcccgggtcttcctcttaccatttgtgaccttgaacatttcgctttaacctctgatcttcagatttcttatctgcacaatgtgggggtagacacccccgccatcgctgcatctttcccaggatggtcaccatcccgcggtgggcggcctctgtgggcagggagagcttcctaggcctgagaaggttccccccaactcccgttgcttctgcctgtgatggccggggggtctagactagcagcacccaggccttccccgcccagtgcgcacgctcgcctgagccgggagctgaccacctctaagggctttcgcccggggccgcgaggacaccacaccctccccaatgactggcgggagaaaacaccaatcggagggacgatgcgggagggggcggggccaatccgcgagccggcgcccggcgcccaccgatctgcagccgctagcgtgcggcgccggtccccgccgttcccgcatcgcacacgggttccccacgggccgagcctcctcggctacggtccaggttttctttattttcattttttgcatgcattcattttctgttctatctcgtccattttaaggcagcggcgacggcgacagcagcgtaggtgcgcgcggggagggggcggccggagaatgcggctccccgctgctgctcggcttgtgtcggagcgtcaagcaggtgggtacaggtgtgccacggaggaagggggtccgggacaccgcacccagtgggtgaaccctgcaacgaggacaccgctacctttgctgcctgtccgatccccacccccagcctccgcgcccctcacaaccgttcatcctacctccnnnnnnnnnnnnnnnnnnnnnnnnnnnnnnnnnnnnnnnnnnnnnnnnnnnnnnnnnnnnnnnnnnnnnnnnnnnnnnnnnnnnnnnnnnnnnnctcccccactctccccagctatcccccccccccatctttcctgtggtggcggcgctccccaacactggcccgttgcttccctgtgtcgctcacaccacatcgctttccactcgtctcgtccttacatcccggagtgaggagtgggaggggacccacccgagccccagcaagcggcgtaggggggcgtggttggccggcccgttccagtcctgagggtctctgcctaggtggagcccagagtatgtaggggtgacccggagtgggaggccgccctggtgatatcccaccccacgcactgcacacgctgcggctgccgggctacgcacaccctcgcgccgctccgcccacgtgtgcgccggggagaaggctggagcgctgcgaagaaaggctggtatccaccctgtgcccggcggcgcgccctgggcgcaccgcctttcggggcaggcgccgggatcagctccatggtgctgcccggttccatgtcgtgctcttggcgatcaggctggcgacctttcggcctccatttagggagctgcgctgtgctgcgtattcctagactttcagtccatcattccaccctcccagctgcgggattccaaggataagcctttttaggccactggccaggctggagcctttcgcttcccttcccgcaccaaggctctaccctagactttcctcggcgctttaagctcaaagatacaggtagctgatccgttcagcacctgccattagtgcacactctggccccctgaccttggccttttctgtgctgttcccattttgggcacgcccttccttcatctggccggctccttgtagaccaaagtaaagccgagctccttgccaatccgtgcttcctagtgtggcaggacgccaccccgccccctcgctctccccgccccccaggccttcgcagtaaattgctgtacctcccaaagccgaggaggagaggggatatctgatgccacctcctgtaacttgggagtctttgatgtgtgggcaaggctaggggaggagctggctgtttctccagatcagagggctggctgatgattgtcccatcaggtgggcaggccaagtggaagggacgggttctaagtgaggtgtggttggaaagctcattttgtgggttcatttgtgaagctgaggattgtcgcaaagtgctcattgagaccttgcttcaggtaggattgctgaggtctgcacgggagttgcagatagttctcatcacctgggccgtttcacaacatgaaattctcaaaaggtttgtggtcttgtagatgtcaagactgtcattccctgttttataagccatcttcagagtcccactgtctccgttgtgcagcaagttcctcactgttggtgtccctggcccacctgatcccttttcctgctgtcctgtctcggcaacttttgtgcttcatggtcttgtctgcacacaaattgggttttccctgccgttcctttaaaatactgtttccttcttgtctgtctgagaaattcctgttcatgtaataatgtaaccctgcaccggagttacattcttgtggctttctcttgatttgccaaactgtgactccctatgtgtaccccccagagcatcacacttgtgtgcaacagcaagatttatgtgggtctcccctcaggcagatctagcccactagggattctgggaactgagatgtctcaaaacctacctgcctcttggaattcggaaggcgttttctacctgggatttctgagtaagggtcctcctgtgaggactaagtattactgtggtccccattcgcttgagtgggtctcctcttccaggatgatagaatggccccactagaatctgtgccctgattcttattgctatgagagatctgggcaagagcactaacctctcgctcagtcttcattttctgtataaatgggggtcgggtggggtgggtggcagtgtccctcttttgctgggttgtctggggatcagagatgtggtcctcttactaaacgatcatgatgataagtctgtgctgagctgtgtccttcagctctgtggcagagcagacgcccttgctggaaactctcgtttgccatggggctaagctgatgatcctaagaagcagtcccgggtgaggtgagctcaggccccggtgtctctgtgtctctaggcaaggcactcagtctctgagctctgtgggagagagggttatataaagagaatagcttgcaccgatctgcctcccacttctgccttgagggctcttattttagccccatgccgtgcaggtacagatcacgtgatgaggacgagcagtttgctccagtagaggagcagaagatcagtgagctttcctctacctcaaatgctgccccatgtgtgaaaccctggcagtgtatcaccatcttcctgcagggctagaataaagcttaggtactgtccctctgctttctatggaaacatggcaccgtaatgacctcctagccactggggctgctatagttagaggctcagaaaaggatcctgggatggccagcaatcctccaactccaaagtgtcaaagaagtgctatctttgcttatgtggttccacaggtagctgaaggcagagaggacgcaggcagcatcggtacaggggtggggtaggggtagctctgggagcctgaactgagagtggagaaggcaggcgtctcataggaagtggacatgaggacagtgaggactctggagatgtaattggatgctgggtcaaaaccctggctgggggtctgaagagatatttcagcagttaaacgcatttgctactcctgaagaggacctgggttgagttcctagcacccatatgcagctcacaaccatctgcaactccaggtccaggaagttctatgccctttcttggcttctgcaggcactgggcatataaatggtgcataggtatacacacaggcaagatatttgtacacataaaataaaagtaatcttttagggacaaaccctagctagaagcagacaagaggtcagcattctgagggcaacccagaggaccagaatgatggatggcactctgctcttgcctctggcttgggcacaccttttctaaatttcccaagaagtgtgcttctcaagagctttcagagtggactggcagatgggtttggaacagtgtagcaaagctcttaccaagtgttagagttcacaccagggttggcagccagtacctgtgtcaatagttactggcacacaaccctgccctgctcttttgtgcaggatggtctgtggctgctttggcttggacccgggagagctggcatggtgggtggaggtggtcgctgccctgtggaccatgctgtctctgactctgaacttgttgagacccagagggagatctcttaagaaatggacactgagaggctcagcacagctggcgagtttgaaggcaggaagtcagtgttctttatttcttcatattttttccttggaactctatactttgattaccactcatttaattttaccacatttgtggggcatagggttcgatatatcttatatctaatgtcaaaatctgctgattaattcttaaaatattttacattaactgtatacttactatttaacaatggctatcccagcaatccttgttaagtgcacagtttgttgcattaagcacagttgcactaatctgtcaccatggctgtcatccatttccagaactttctattatcctaagctgcaggatgagttctttacggaccctcactgcccagtgcaaataccagcttcaggttcgtgccagtgttgctttttaccagttaactgtgcaaacaaacgtttgtgcccttcaggatcctctgcattttactttccttatttggtgagagtcaatggtcctcgtgtcatggattttgtcaacctgacatagacctagacacgctttagaaggggagtctgaattgaaggatttcgtctatcagattggtctctgggcatgtctgtggaggattcattgtcttgatggctaattgatgtggaagagcccagcccactgtgaactatgccactcctgggaagttgatagtaggttgtataagaaagcaggctgaataagccatggggaacaaaccagtaagcagcactccaatatgacctcagcttcagttcctgccttcaagtccttgtcttgaattcctgccctgacttcctgcagtgactgacagtaacctgtaacaactcccaccgtgcccaccttgaagttgttatgggtcaatattgtgtcacaccgacagaatgcaaactagaccagaaattggtaccaaggggtgttgctataattgacctgaccatgttgtttggggcaatgggagaaacatttgaagctttgggctagaaaagccatttgcgctcagagcttaatggtctattctgtgggagcttgtgggtgctgaaatctgtgcagacagtggaggcctgccttgtgaggcttcagaggaaaagtttgagagtccatcaaagacactgttggggccattttatgatagattttgagtggagactgtagtttctggtcaactgaggctgaagaatcaacagtgattaataagacaccagtatcactgagatcttctgggaggtgtctcctctgggtcagcacacagaagctgaggtccagaaggggccaaggctgcagctcaagctggccacagaagttggtgacgcataagagtcccttaggtagttctggatttgaaagcatgaaggggccatggagagcagctgaggcttggcactggagaggccaggccaggccaggccaccagtgaatgtatagcttcaaaagcagtgaaaccattaagattgatggtatcatggagagaagtttggaggccaagagaggccattggtgaaggtatggctgtgggcaccccaggatattagagatgttggaccctgggacatcctgcaaggacagtagtgggtgtgaagtgcagctggttagagctgacaaggcaagctacgggttctgtggatggcagaactgaaggggtggttacaaccaatcatttagagcccagaaaatcaagggtgagtccaagatggacatcgaacttttcccactgttgagtattggtttggttttgttttgcttgtaactgtggtctggtccttccctctcggaataaggaaacatggaacttgttttgggtttcacacaggcattcacagttaatagagttttggttttattctttatattttatgtgtgtgagtgttttgcctgcatgcatgtaagtgcactgtgtgtgtgtgtgtgtgtgtgtgtgtgtgtgtgtgtgtgtgtgtgtccttcagagatcaggaaagaactagttgcaaggtaagttggaaatagagttacagatggttgtgagccaccatgtgggtgctgggttacaaacccagatcctcagccagttctcttaaccactgagccatttctctagaccctggatttttatttataaaatttttgggtttattttatgtgtttgagtgttttgcctgtatgcacatatgtatgtatatgttatggatggttgtgagacattaggtaagtgctgggaaccgaacgttggtcttctgcaagagctccagtgctcttaactgctgagccatctcagaagccctgatgttggatttaaaaagaaatcatggactttaaaatcattgacaattttctttttaaagagtagaacttttaaaattggactgtcttttatattgtgatagtaacatgagatcttagggccaaggaatgaaagagtatggcttgaagtgatatatttgtgtctcaatttcactcagggtagaatgccatactatttttttaatgacattatttatttgttgaggggagagtacctgctacagctgtgtggatgtgagaggacaacatgtgagcgttggttctctccttccactgtgtggcacctggggatggaactcagaccattaggcctggccacaaagtacttttatctgttgagccatttctcatactttgctttgccagcttgatacagacctggacactcctcggaagagagagcatacattgaggaattgcctccatcagattggcctgtgggcgagtctaaggagtattgtcttgatgtgaggtgtgagatgtgatgggagaagacccgtccattgggagtgctgccaccccgtgtaggtggacctaggcatgtgaaagacatggggggcaagctagtaagcagcattcctccatggtcattctgttcctgttttgagttcctgtcctggctttcctggatgatggacagtaagctgtaagatgaaataaaccctggttgcttttggtcagtgctttatcccagcaacagaaagcaaagtagaacactggagttttgtgcttgcaaatcccctggacaaaaagatggggaaggtcttgtttggcactgtgcagcagacagaagttgtctcctgggacagcacattcgggcagctattggtctgttatgtgttgttcggtgtgacctgagtgtggcctcttccccctatccagggcctggtacacttcagtgccctgatgacttcagcctaaccatggcaacctgggactgggcactggccgcctgctttctctccctgtggccctggcttggctgaaggaccactttgaggaatgaaagaggttctgtgtgcatcagtggggtctgggctttgtggtggtaatgtgcttgtgtattccaggtcacagggacgtgctggctcagccttctggcctgtagcctctccctcgcagtgttttgagtccagaggttttggtacttaactcggggatggacagagtgggatgtgccatgggaggggtgtcctgtttccccgcagagctgaggcataaaagtcaggtgggtagcgacagattagagggctccttccatgtcccttttaatagtgttttggaggctggcactgtacctgtgcactccagcatgggacactgtttaatgatgtcaacaatctgcatcttccattgaggcagtccacctccttccctgttctacatgacttcttaaaacaataacaacaacaacaaaaataaccgatgtaaatttacagaccataaagctaactaaccattgcaatggttctgggtcctccatgcccagccctgtgctgggagcatccaaccaggagtccagtttagtggctcctcatctccccagcaagagcatgggagtaccccgaagctggggagaggacttgaggagtgggggagcggccaagggaggcctgctggcacagtgcagggaaccctagctgcctctctgccagtttctggaacatgccggactcttgctgtgacgagcatttctgtttgctgtttgctctctggaaggctgtcttctgccctggccctggatgactgtttggcttccttcccatcttaaagtgctgtcgcaggtcagaactccactttcccctcatccttgcttcagtttccttctgagagtcatcgtgagctgatatgactttgtttccctctttcacgtccactctccaccctgaagagcatcatgcatgcggagactcatttcccaagttttcagccatccaggtggtgttcacgtgcaccactcatcactgctgcgtggaggtggggtgacttagttttccccatgctgccttgctcactctgagcacaaggcttcatttttttctgggttctgcatcctctgtaagatctggagggtgtccttatttttccccggtctgctgttgctaaggcatgaaaggctagcccagtataaggtttgtgatacccctgctggaggtgcttagactgagtgagcgtcctcaggcttggaaactcaggtacctgtgtcagatgaccaggagacctccggagctgagctgctgttgcagcagtgtggctcctgagctctgagacatgactccagcaggcaaggggtcagacttactaatgtgaataagcccaggggtgagtggagccatgggcatgtggggagagggtcctgctggggaggtgttgagtactgttaatattactagttgctgtttcaattttatgatgtaatcactagaatatttaaagtgacagactgatggggtaggctcggggctaactagccccgcctccccgacccctgcccaaggcctgggcttgctctagcactgcacaactgaagtgacagtatccatgttgggccctgctgctgtaggctgaagctccctgaggctaagtgttggtagtacaaggtatttacacccaccagtttccccaccccaactctgtcttctgttgcctgtgtgaccttgggccagggaggattgtggctctttggtttcctgttctgtgaaccagaagctcagcctgatgacaaacagtgacagggaaccattgtcctcagcagggtttcttgtatcttgggcccccaggtcttagagaacctggagctgcctttgttggggaggggagagacccacagggcacacagtttgaataaaaatacaaacctagtattgacaccagcccaaatggctttttgaaggctggaggcagggaatactgatggtcccatccacaaggttttctgctcatagctttgtgctgtggggtgggagtgggagggctcacagttgcttatcactaacttgtagcctaggtagtcactctgatatgtctggagagtgctggacactcctagtgtcacttctactaagggtattagtttctcaagtcggctacaatattttaccctagaaacttaagatgttttccagtacttccctacatggctgtggcccctgctatctccagcaggggtgcctaatctaccactttctgccaggccagttaggacactgtgtgttgaatgatcccttgctggcttcttccgtggagctctggtgcctgaaagtgtctggcaggtatcaaggtggaagtgggttgggctcacacataaattgaaatgactttggctatgtgatcgagggtcgtgtgtgtgtgtgtgtgtgtgtgtgtgtgtgtgtgtgtgtgtgtgtgtgagtgtgtgtgtgtgtgagtcctgtgagtttcaggtgcttcctgagacttctaagttttatttacttcctagggaattaaaaatatctttattttgtatgtatgagtgtttttcctgcaggtgtacatgtgttatgcatgtctggtgctcagggaggtcagaagagggcatcagatcccttggaactggagttatgattgactataagccacaagatgtgtagatttggagaaatgaacttagattccctgcaagggcaacaagtactctcagttactgagccttctctacagcctccaacttcttgagtcctttaagtcctctctttccatgagtgatcagacaccatgaccaaggcaactcttagaaggacaacatttaattggggctggcttacaggttcagaagttcagtccgttatcaccaaggcaggaacatggcagcatccagtcaggcatgatacaggaggagctgagagttctacatcttcatctgaaggctgctagcagaatactcacctccaggaagctagggcaagggtcttaaatccatgtacacagtgacacacctactccaataaggccacacctccaaatagtgccactccctgggccaatcatattcaaactatgacaataagggaatatttcctagttgttacagacacattatatgaatggaggcaatgggctgtccctggagcatcctctggacagggaacggacttgctttgttggctgcactgtctagccactgttcctgaccaagcaggctttctctgtttgcccattcctgcccagccaatgccatgccttcatttggagctcatcttcattaccaggctttccttctgagattcttctcccacagcatcatgtgccccctccccagacctccctcagcctgtttctgtagttttgctcaagactaacactagatgctccaagacacaaactagccctgttgctgtagggtatcgggaaatgggagtcctccagcagaggacagggaagcaggcagaatcaaccatttcatagtataagttgtcattttgagagttcacaagccccaggccactgggttgcagctatctttcagtttttgctggtgaatggtgaggagggctttgcaggtaagctaggaggttgaatagtggtgtcactcaggcactgaggcaggccgagagctttcggtgctgtctgacctgttcagttcataaggcccttctgtgccctagagcttccttggcacccataccgatagcctcaagagcaaggtatgtttgaaaattttagccgccaccaccacaccttggtgtgaagccttgatctatcatgaacctaacctgaggacctcgtcctgccttctgatgaggagatccacttgaagacctcagatgtgccagccgtggaggctggcagcaggcattctggactgcagctggtgtcctgtggccgttcgatgaggagtccatttgctccttcccatttaccggcaccagagagggaagaaaatgatggatctgaaaaacaagccgttgaagaagcttaaaattgtctatcgacattaaacataaataactcttggctcctgagttatctgctgagtgcagtccctgcttcatttaaagcaataaagggaacagaggaatggaaagatgaaagcagtgggtgagggagagtccggtcagtgtcctcaggatgagggacacgggtctgcccatgcttacacccaagcatgtatagacagcactgagtgaactcagtgggtttaataaagacagagcttgtcagtttgagagggaaacatggttggtggggtaggggaggagctgtagaggagtgggtgaggatgagcttgataaaaattatatgcatatataaaattattgaacaataataaagggaaaaaaagacaaaatggcagaggccagtccaatcattccaatgacactattaaccaggaatgtgtgagacaatccaatcaaaagatggatgttttcagaaaggatagaacctgtgctccaactctatgctatcttaatccacctggtctactgtaacaaaatatcttaggcttggagcttgtaaataaagtaaatttctctcacacatactggagggtggtagtctcagagtgcgtacatattcagtgtctgctgagggcctgcttctctgtagctagcaggtttcctggtgagcccccctatgtcagggagggctgccatgccttgggtctaaccccacttgtgggggcagaacttcaccagtcacctccctgccccaccgcaggctgtcacatttgttaggtcttagaggcgcatgtctgactcagatctgggaacataagaccttggaccacagcactgccccgtgagacacattttagatccagaggaataaacagacgttgaaggatgggaatagaaacccagagaaaactagagttgctctgtggatatcaaacaaaatagactttaaaataaaataatcactagagacgaggaacaacattttgtaagtataaaaaaggattgttttcacaggacaagttaacaatttgtcagcatgctctcacttaacaacgtagcatcaaaattcatgagcataacccccaaaatgaagggaagtattcaataatgatagtcactcacacacttcattttcctgcaccctttgtggtgctagggatgccacccaggctctcaaacacacgattcagtgctctatactgaggcacaccctccactcaatatcccattcttttttaaattttctaatttttgagcattttttttattctttgtgaatttcacatatgaatatcatgtattgtagtcatatgcatttccctgttccccttttatccttctggacctccctcctccccccaactacccaacagcccctccccactttaggctctcttcttttttcttgtcactaacggagtccagttagtgctgcctgtgtgcatgtacaccggtgtggggccatccgctggagcttggcaacctaccaggagccacaaccctaaaggaaaaaaaaaaaaaaaaaaaaaaaaaagactcttcccttcctcagcagctattggctagcgatannnnnnnnnnnnnnnnnnnnnnnnnnnnnnnnnnnnnnnnnnnnnnnnnnnnnnnnnnnnnnnnnnnnntgctgaatgttgactggctggatcttgtgcaggcaatctcagctgctgtgagttcgtgagcgcattggttcccatcatgcctagaagacactggcataggtctcctattctccagaaccttttttgccatgttacctgaagtagaggcaggcgtactgtagatgcccctttagggctaagcactctaattggccgtgagcccttcactaagtgcagttgtgaaaacaaggctctctgatgagggcagagagcagtattcctgttaatagacagaacgaatggacagaaactgacaaagacgggggcactcgagcaacactgtaaaaccacccgcggtaacgggcactagcagaggtcagtagagggcgcagatttcttcctgggcgacatccaaggccccgcttttccttttaccttctcacaatccttctacccccttattccctggctgggttgttctggtcttctatgacaagtttcccagcttgtcccctgtccctttgtgactgtcaccgtttaccttcctgccctgcctgctgatcgtgtctacgaccaacctgaaccgaccattcttttttgcccccaacaccgataaccccactcctaccactgtccagccttctttaggactcaggattctcccaagctcgcttcaccttcccttccgtggcctcttctcgggctccacccaccctagtggatgcttggctctgtatgcctgcctcttcatcgctgatgtgactgctctgagggcgggtcctgaacctgctactgctgctgagccttcttattgcacaaaaggattggaaagtagcgtagtcctgcactgaggtaatgcagtgtttatttgtagtctagacataccgtcagtgaagtattaataggaacattgatcctagcctgggtaagggtatgcatgatcggctggaaggaacctctctaaagagcatgtgtagtgggaagataaagattagttagcagtggcagcagtagctccaggaagcatttcatgacttcatatcctctggtgctctgcctttgagcagcctgcctctttagtccttttgctgcttttgatcggccctccaatgagaactagagagcagggtttttgtttgtttgtttgcttttgttttttgctaaagtgtttgacaggttcctctcctgttaggaatttctgtcctctcctgctgattctgagggtggcctgaggaccttgactgtgtgcagggtgcagaggccttcctgtgcacataggcactattttcaaactggtgctttggggacagtatacttggcttctggtaccttcttgcagaaggaagaagaagtcctggctcgttcgctgtgctctccctgcatgggatgatgggtgtggccacacatctgggagaagaggggaggctgagtgaggggtgaaaaactgtgggccagggtcttgggaggaggtcccagaggacctgggtttggcttctctgcagcctcttggtgatgtttgagggtccttttgccaagggcagggcatctggctggtttccacccattaagtagggacggtggtccctgagcagtgtgtgacacctgtacccatctctggcctgcttcctcatcctcagattaaagtgtttaaaaatgatttttaaatcaattattatttaaaatatgtgtgtttatgtatggtgggtgtacgcatgcgtgccatgcccacgtctgtgccagagtggagccagcggaggacattggctgccttgctctatggctttctaccttattcctttgagacaaggtctgtcactgaacccagagctactccagaaagtttcagtaatcctcctgtttcagtctccatcatagtactggggttacaggtgcaggagaccacacctatatctttatgagggctttggagatttgaactcaggtccttctgcttgtgcggcaagggctgttgttacccactgagccatctctccatcctccacaccattaaaaaaacccacagctaaaccatcttgttctaataaacaaaacgggagtggtgtcaagttcagctctttgtctctgccaacactggttttctcttgaagactattttaccttgatgaatttaacatttggaaaagaagtctgggaggccatgcacggagtctgtggcacggagtgctgattgacagcaggcttggctgttgccatggaaatatcctgtgtagcgacaatatacccaatgttcctgcaaatggcaacatccatgagctctgcaggctcagatctcttcccaagagaggatgggatggctgtacccaagacaggatgttgataagcactcactgggcagcctagaaagaaacaaaaccagactgggcctgtcaggatcactctcccagcctccaacatcttcaagacatacttgagacttcacacatctgggtttgaaaaatgggctctgtacctgagtgctgaatatcttgctccgttttagacattggcccctctcctctgcctggcacttgtatcgctgggatgtcatgaatgagtcaggtggttgttagctcttctgtcccaaaccttcaagcatcaaggttgagagcttccaggaccactgttgactgatggatgaggctgggagctatgctcctctaagtatctgaaacacagcagggtcctgtgtctcctggaatgtttgagatctttctccacttctccattggagtaactctcaatttgtaggaaacatttgggaaattgaataaatgaaccaagacaggataacatagtcatgaaactcatgcctgatgaaagggctcccacaatagattcaaaacacagactcctgtcactacctgtgtggcctcttgaagggacacatacccagtacttgagttggtagacaactgggtcactctaacaaactccagaggctggaacttgccacagagattgcttctcaatgtgtcacaggctgcgtagtctgaggtgaaggttctgggctattctggtctggtgaggtcctttttgtttgcagtttgcaatgttctcctgtgccctgctatgctggtaacaggcagaagcaagctctcttttttgtcctgtcctgccttttgtcatatgaagtccccgcctcatcataccatatgaccctgttaggggcatagcatatgaaccttgggtgtcccagctgccatctctaactcactaggcccagcctttgtcctgtctactgctgtgcctttcccctgccacacctttcctggtacctccgaccatgcccaggcccctctcctcagatagttctctcatctgctgttcctctctgtgtcccagattggtcccccccatgtagctcttctcttccacatctcttcccagagcagttcaatatacatggaggagctgttctgggattcatgtgtgagattctagtggtcagcatgaatcccagggtggagcaggcaggggtgctgctgagtcagtgtatatgtgaatgagacttggggtccctcctgctctgtctgcctgggtgcctctcatctcccttaggctcctgtgcctctctgtaaattctcatttacagagacaggcccacatcaagtgtccctccatcagaggggtccccatgactcctgtggctaagccttacctggccttgttatggtatcttcccaacttaactgggaactccttgactgtatttgtgttgtggtagggatggtgtcaggatgtccactctagggttggtactgtgcgggtgtgtgtgtgtctgtagatgacctcaggacatctccttcactccctgatgagctactacaaagctggtgagtaacccctccccaaccatggctgagcaccccactctctgaactccaagtccctccctccccatctcatctcccctcaaccacacttcctggagcttctagagagaaatcatgacacctgtgaactctgggtcccctccctctgggtccctggcatggcttttagacaatctgtgcacacagccagtgcactctgcagagagcgccctatgtatgtcaagccacactgagctcagaaaggatgtggaaaccacagaaagaagttattcttttcttggccctcaccaaccgttcctacccattctcaggggtggccctcacccaccagctctctggggtgtgtgtactcttggcctcttggctcacttcagcagagttgatgcagaaacaacaggaggcctaagcctctggggagactttttaagggtcctgtctcatcaataagggattcttgggtgctgcaggcagtctgcccagaggcaggctttgcattctggtggggagattagcaaattcttacagtccatccgaggccgaattctgccctacaaaataagggaaataatggatctttctccaagaagttcagagcactaaaataatgtgtcagttaccccgccccccaaggtgttataccatctcagaaggggcagccacccaccctcacactcgcaggatggctggggctctttgggctctctttctcatgaatggagctagcttgaccttttctctgattgacctgacagcaactttgtggttctagcctccgggcctagcataataaatggtccctataagtcacactcctgaacaggttaggacaaaagacaatagagccattccctgtggctgtaaccacttgctgaacacattgtctaaggaattcacccttcctgctggattactagcaggtggttatttctttatatatatttcatgaatgtgtgttggcaattgtgttcacatgtgtgtgcatgtgtatatatgtctgtgtaccgtggagccccgcccccaaacctcccaggatgacatcatttgccttccttgatcactctccacctattgacaaaaagtctcttactgaacctggagcttgccatgtcaaccagtctgagtagccagtttgctctggagcaccacctgtctctggctctcctgtgctgggattgcaggaggaccctcatacctactccttttttttttttttttttttttttttttggggtttctctgtatagccctggctgtcctggaactcactgtatagaccaggctggcctggaactcagaaatcagcctgcctctgcctcccgagtgctgggattaaaggcgtgcgctaccacgaccggctgaatacctactccttttatgtgggtccttgagaactgaactctaggccttatcaataagccatcaggaaggactgtcttggtgtggacagagctattcacaggcttcagagcagcgattgtctaaaagcattgccacagtttctggcactccgcaggagctgtagaagcggtggctgttatcagttggcacatatttcttcgtttgtgctggattccgtctagagagaggagggtacagattctggcacttagttattcttgcagaatatgtatcacccatttctacctccgtctctcctttccagcccctggtaagatcacacacacacacacacacacacacacacacacacacacacacacacacacacacgagaagctcaaggacaaagaggagttcccatacagagtgtcgggagggaagcaccctacactctcctgagtgcctgtaaacaactccagtgacaattggatcagccttcagagtgtgtgtttctgagtgtcttaacacactcagaggagcaggtgtgtttttttttttttaagtcagaaattgtgtttgtggtggaaaatcgaaaagtctgattatactgggagctcagtgtcaaatattctgggatttctgttttatgggaatgccttggtggtgtttggttttgtcagcgtgctttgttcttggaggctgtagctgggtgtgcaggaaggagcctggttgctcatctctgagtgtgttcttggcgtcttccatgagcatgcctgagctgtgctgctctgaagagcagggaacaaaccaggcaggtctttctgcagctggggagtgcctggggtttccttcctgccatctgcagcaagtgcctcacgtttctttatcgtttctttagcggtccaatgatactgttgcttgttcaaccagggggcctggtggatgggctgtgatgaggggtgctggctcacttacactgcctgccaccagctagttttaacactgctcctgagtctggaagcagctgtgatatcttgagcttgacttggaaccatcttgagctccatcctcgcaagccttctgccacaatggacaggtctccttttgcaggtgatgtggttgggaagtgagagtccagttttcttggtgtgtgtgtgtgtgtgtgtgtgtgtgtgtgtgtgcgcgcgcgcgcgcgctcgcgtgtgtgtttctgctgctctgtacagtagaaggtagaagaagcaggccacagaggatgggcctggtctcctgctggggttcagtcttcctgtttccttgcccccacctgctgcagtgctgtggtatttacagagtgctccctgcggcaggtgctgtagcttcctcctcagcctttcaacctccacggccagaggaggcaaatcctgggatgtaacagccactgaaaggtgagagctatgagtgggggggggggggcacccctggagtgaaagagccttgcttctctctctacacttgcaaagctttcaggcctacccgaggaaagaggctgggagaccagggtgtgcccagggaagagcagataagattccatttcatgacaaaaggtttgcgaagcagtttggaataccccgcggctgcggctggttctatggtttcctgagaactttctgggccgaggagaacttgcccttcttaaacctcgcacctccgaggcttcctggctgttggtgttttgtgtgctttgggggctgagtctctgtcctggagagagaattggtaaccagtgcaaggtttcagtggccccagcccagtcctagaggtggtggagacagctgtgagctgccatttgttaattgtgataggaaacgctgcttttatgaaggtaaggtgtcttctaactaaaaagagacagagacactacaaaactattaaggatgggctttttaacgtttatttatttattcagtgtgggcatgtgtcaaatgattagcacccaggaatttttttttttcttttctggaagggtgtgggggagagaacagagatcagggaaaggggcgtggcccagggaggcgggcttgagagtgagacttcctcctgacttcaaaagccagaccggaagtcagactgtatgtaccggaagtagaattaatatgttagggctgttagaattcattgacttctttttctatttaaaattgcccccaaggttgagtgactctgcagggtgtaggaggcagatggacagcgaggtgcagcgagcagggcctcaaggcaggtggagctgggcactctggtggccaagaggacctggccctgatgtaggtaatggctctggaggccacaggggtcgctggtatggggatgagtgttctttgcgtcattctgtcctgcgaatgtgactttacttaggacgaatacctttacccatacaacagtgccaggactctgaggcaacaccctcgataaagaccttaggacagtaagggttggagctgggacttgaccctaagtctggaacgagttcttgactcttttttcttcattctgcatccatggaagcccgagggtttcagggcctccgggtccatgttggtttcctggggcagccatgactagccaagtatgagtgagatgttggtaaaaacagtacgggggtgagggtgagatggtggaagggcatgcgttcagatcctgcttccgagtatatttaggagttagatacattcccattgacttgatgtccatctgtgtggtgagtgttgtgttttataaaaagagagaggccagggatatatttggtggaggtgtgttgcagaatggtgtggggaaagggggtgctcctgccggcccatgctgaggcatccctttaccctgaggtaccagctataccgatggtatagttatagaatagagtttatttagggcatgggagaggggttgaggagtaaagacagagaaaggcagagagagggggaggggagggaaggagagaagagaggagaggagaggaagggaagggagtggagaggaggggaggagaggagaggaggccagctatgagcatgtggagagagaggggggaggggagtggggagagagggtaaggggcaagagtgagaggagaagagggcaagggagcaaggacaagcagccccttttatagtgagtcaggcacacctggctgttgctaggtaactgtggggcggagcctagacaaggagtgtgaggagtggaccagatggcctttcttaaagtcccaaccctgggacctgttaatttattacagtgtatcctaaatacttttctgcttggtagccttgattgatatctgtccaccatttctttcccacccaaagttcctgtgttgtttcacagtgctgacagggcgagtgcttctcaggcagccaatcttcatgacaacaggcctgtgttgcactgcttattttacaatagggaccattgctttctggccccactagccatctttactgtgtccaagctcacccactgggaactccaggtaaggggccccgctgtctgggaggcatgtgcttacctgctgggttcctgggtccttcaggggtcaccttcctgctgtgagcctcagtttctcctttgtcggagctggtacagtctggctttgctgccccatgctgagtgagtccagacgatgggacacagctctgcttccccactctgaagagaagtggtcacaggaagacagggaggctgaaaactagatgaagatactaacaccattaatagcgctttgggaattctgtttcatttacttgtttcatgagttctccgtttaggctgtaggtcttggctttcttattcatatctgtgccttgtctcagatagcatcttaccgccaccaaagacacatgcttttctctgtccttcatcccagctagtggctcacctccaggccgatcctggaggcacagctctgaggtgtgagggagttttctttctagcatataccttggggtggctccattttgagcttgctcaaaccttgtagtgatctgttgtcgcttggtctttgttgacactctagggcacaatgcaccttgtatatctccatgactttgagtgtcggtctaaagtggtagcgggaagaggtgtgctgctaagaacctgggtgtaacttggactctgcagagggttgtgagctgagatgtgggtgctctgacctaggcacagctggggaaactattcaaagctggagagaagaagtacacacagcttatttagaaaacacactcatcggttcttacagtgtgccctaggcagtgagttgtgccccgggtgttgctgggagaggatcttggctgcagaatagctgcattaggactggctgctactggaaagatgccccccatagaagtggccttagctgtgaagagtcttttttgatacttcttatttttgggtgtggtcttactttattttattgttttggtgacgtatgtgtgtgggaggttcctcctttcaaggattcctgtctccattttgttaaggctctgtaaaaccaaatctgtggtcagtctgcaaactttgtgacacactatcatgtgtctctcacctgcttgggggacacatctgcttcccagagggcagtggccttgagagacccagaggtgagcactgtgtgactttggtagccttctaacctcaaggccttccttaaagcacctgttcctttaagtgggggaaagtctgtgctgagggcagccttctgcaggtgtggcagagagccgcaccctggtagctggctgcatgtgtgctcagggaggtgtgctggggcagtgttcatctgccagggcacagaggagaccgctcatctgtccaaggctgaccttgctgggtgagtcctcggctgggatcaaacactcccctcccccactcctctcccccttccatcctctccactcgggtgcatgactcatctggatgaaaggggagcctggggctcctgatcatctaggcttctaggcatggttgcacgcagtgtcagctacttctcaatatgctgggactgcagatctcacgggcacatctcaagggaggatggtttcattttgaccccggtttaaaaggctgcagttcgttgtggtgggggaaggcatggaggtgctgctctgtgataagagtgtgaagtaattgcttacaccctagggccctcagaaagctgagagctcttggagggagagcagagttgtaactctctgacccatgctctaatgacccacttcctctaggatgtctaggtcctacctcccaagatttcacaacctcccaaaaccacctggcaaacgtgttcgtgtgcgtgtgcgtgtgtttgtacctgtgtttgtgcttgctcatgtatgtatcttaccttcaagccctagtgcactgtggaggttcagcatgatagaattaatcatactattgcaaagaagaaaaacaacccacaccaacgtgggcttcctctgcggtttctgtttgatactcactggggctcacacttagagaggtggcgcttttttgttgttgttcaatacatacttgaaaaatttgtgtattcaatgtacatggtgctgtgtcccataaagactctgtcatatgagtggacaatgtatattcagcacgccctccattctcctttccttttcttccccatcttgctagtcttctttgtctctaagcactttcagttctactccgatatcctgtatacatctgcgactttaggttccgagcaaagtctatgaactacaaatgagaaagataacaaataagaaagataacttctcgttctgagactggtttgattcgattaatgtgatcatgtccacgggcacccatttcctgcaaatgacataactttgctctctgtggctggaagaaatttcacgtttgtgtagataaacacgttttaaaaccagttcctgtcttggtggacactggggctgttgtgaagtgctacagtagacatgggtgtgtaaggatctctgtggcctgctgaggggtttctttgaatacataccagaatggtgtatggattaaatggtaaacatagtttgagttttttgaggaactgatttccaccctggcttagactagtttacattcccaccagctgtgtgtaagggtttcattttgtccatacccttgacaatatttgttgtttttcttttctctctctgtgtgttttatttgtgtgtgtgtgacatttggtgtcctgctccaccactcactgaacctagagctaggctggcagccagctaaccttagctatcctcctgcctctacttcccacagcactgagggtaagggggcatatgtggccatgcccagctatttatatgggtgctaggtatccggactcgagtccccaggcttacacagtacccagctcccttctccatctcctgagtgtgtgcatgcgtatgcgtgcatatgtgcacgcgtgcgtgcgtgcgtgcgtgcgtgcgtgcatgtgtgtgtgtgtgtgtgctttcctgatgactgccattctccctggggtaggatggaatttcagtggagtttggatgtgcatgtctttggtggctgatgacggtgaacagtcttttgcttgtttgttttctttctgtttattggccctttgtacaccttctgagaaccatctgttcacttcatcagcttgttatcgattgggtttagtttctgtttagttcagagtttgttgtgtggtctagatctcagtcctttgtcaggtgtttagctagccaagattttctcccatcctgctggctgctccctgcttggctgtttctcctggactgagatgaagcttcggaatctcgcgagatctccttggttagttgttggctgcatttcctgacaactggaatcccattcaggaagcccttacctatgtctaatcttttcttaataataaaaaaaaatcgtatgtatggatgtttgcctacaagtgtctgtgccccacttgcgtgctccaggagactagaagaggacattggatcccctggcactggggttacagatggtcatgagccacaatgggggtgcttggcactgagcccatttcctctggaagagcagtcagtgctcttagccactgagcctatgctgaatcttgaagtatattctctgatttttcctgtccctttcggtgtttcaagtttcatactaaagtctctgatccatttggggctgactttgtacacggtcggagacagggatctaatgtagtttttctgcacgtggatgtccagttctcccaccaccatttgttaaagatgttgcctcttctccagtttgtattgttggcattttctctaaaaatcagctacagccgtagctgtgtgggtttgtatacgggcctgctattcttttataatttcacacatacatctataaaatgtacttggagcttgcttctcctcccttacatcctcatcccctgctcctctcgctgaacatcctcttctcccctccccctcttcatctaataaggcttctgtgtataagtaagggtggggggttctttacttgagtgatagcagcttgccagtggctataccaagggaaaaagggtcccctttctcttagcagccattaactgcctctggctccttgggggaggggtggggctgtgtgagcatctccccattcgtgctggaatgttggtggcccagtcttatgccttaggtagctactaaggccctagagctatgggttcaccagtcatgttgtatccaaaagacagtgtttcatggtactgtctgcagtaccttacatcctttatgtcctgctttatgcaggattctctgagcctttgagggggcaaaacagatgtcagtttagggctgagcacccaacagttattctcagcactttgtgggtcttctatggcattctatgatgttttgtcactgtggcgctgcagggtgacttgaactgaggtgtgctgacccccagtgtcaccatgactgtgcaaggtgacttgaactgaggtgcgcagaccccccagcatccttgaatatgctcaagatggtaccttcctgtaaggtgccagggtgcttgctctgggctcacatgcttgtgccatagtttgattacatatgagctatgtgactttggatgagtacctctgtctctctgagccttcctggactcaggagtcttttgcagaacaagtgccctgcctgatagtattgctgcccagatctttctcactagcgtccaaagagagtttaagaggacatgtaataggggccaagcgagggggtccttctccatgcctggagtttggttctgtcctcagggaagtaggcagacaggcacagtgtgtgactgtatctgtcttccaatgctcagagacagtgtatctgcctaggtcaggggactctgggtcagaactcagtgtggttcccagtggtccaggggattgatggctgcctggatgcatttgcggaaagaagaggcaagggaatagtggagcagatgacaaaaaaccactgcaaccacctgactgggggtcaaggtctagttgagggcactctggacctaggaagagacacagagggatgagtaggaaggtctcttttaagagtgtctagaggtgaactggaagtacatttatttttttacgtgtgtgtgtgtgaatgtgtgtgtatgtgcatgtgtgtttgtgtgtgcatgtgtgtttgtgtgtgtatgcatgtgtgtgtgaatgtgtgtgtatgtgcatgtgtgtgtgcatgtgtgtttgtgtgtgtgtgcatgtgtgtgtgaatatgtgtgtgtgaatgtgtgtgtatgtgcatgtgtgtttgtgtgtgtgtgcatgtgtgtgtgaatatgtgtgtgtgtgaatgtgtgtgtgtatgtgcatgtgtgtgtgtgtgtatgtgcatgtgtgtttgtgcatgtgtgtgcgtgtgtttgtgtgtgtgtgtaggttggagggcagtgagtccatgtgagtaagcacctctgccacagcacatatgtggaagtcagaggacatctgggagttggttctctccttctactgtaggttccacgagttgaacacagtttatcaggcctgtgaggcaagctcttttacctggtgaaccatcttattagtcctgagagaaggtttagtgttgcaggaaatattaaaaaaaaaaaaaaaaaagaaccagcatgttcccacatatgtgctggcaactctcggccccactgtggtcctgttgattctgtctctacctgccatctctccagcagggctggagctcataagttcctcacgctgacacgcaatgaccgtccaccccatggtcagccaccacaacacccatctacccagtagaaacaaaactcttaaagcttatagttaaccagatttatgtatcaataaattctcaatttacaagatgccaattcaatagtttcagaaccaattgataatgataaaagctttatcgcaattattacaaccttgtgataccataactacctatggctggttaaagtcatgctggttcacacccacctccatcctggccttcctcttctcccctctgagatgctctctgcccctgcaactcttagctccatctcccttttccctgtccaatcacaggcctcctgctgccctaatgtgattggatgggaaaaaccctgcaacagtttagcttgttctccaagagggtgtgagcaattgcagatgtggaaactgaggcctgcagcagcagtgtgaccatccatgttaatccagatggtccagagatgtgtagctaagttcctggctcttatgtgctgggcctgctctgagtcatacttccacatcccagggatagaggaccgcctgcctaatggctcttggcttctgatttcttgaccatggcagctgatgttagccaggagcttggtgttatgctgctcctcatttatcaaaggccacatgtcacctgatggtactggctgttctccacatgtcattatattcttctgtgtgtccatttagttattctgggggagtttgtggctagtgggtaggtagcactgactgatggactgtactctctgtacaactgctctgaggcagggtaggacattgttgtgacatttgggtggtgacaagtgtatttattgtcaatggaggggcttctagcattggtaactgtcattgtcatggctgcccttcagtgtctgcaggggaccagtttcaccaggtactgaaacctcacgattctccaaatggggctgtgtttgatggaacccacatacatcccccgtgagccgtttagttgtctcttgttttgggtgacatttgacgatgtggaagcctgtgcaagactcttgctctgaccctgtatttgtttcagcaagcaaaaaggaaaagtttatgtgtgtcagtgtagatgcaattaaaaaatctttctcatccacggttggctgaactcacagatgtggagcccactgacattgggggggggggaatgactgttttatgatttttatatcatctttggtcttaagatcaaagtcacagtgttcaggatgggaagtcacatgtctgtgacttaaaagagattcataaaaatagtcattatgcacagaaatgcgtcttcttagacaggggaagcagctgtggagaagtgggggcagctggggcctccagatgtagggacgggaggtccctttactgctctacattctttgtggcttttgaagtttatcaatgtccttgggggcaaaaatattctagacccatggctgctgtgtcccctggtccatcccgaggtctccccttcatgtctctaagacgttgaatgtttgaagagctctcatccacattccttcctggttggttccttggggcccagcactggcgcaaaggcaggagcgtccgactttctctccctctgtagggatggcaccatttttagaatgtctgtgctggacctttactttcagattttccttttcctcgacattttcgatcagtggttttggtaacacatgcatactgaatatttcacaccggtctgggtaggacttacatacagcagcaatggcagctttagtgacgtcataacaagtggcttcaacccatgggggaaaatgatatcatcctgtgtgctaggtcttatttccaacactcaccacccagcacagtttgcttaggaagccagccctatgagagccaaaggctctacccagaaaagcaattgctgcgtactgtctggagggtcagagttctcttccctgatcccctggactgaaaggatgtgcacatagcatgttggagagagtaaagggctctcgccaccatggggtggagaaggctggtgatgaatttggtgaggtcagttgtggggttgtagctgcctgtgtctggaggccacccctccccagctgtgaaccaccttcctcactgtgtctgcagtgatgctcaggagcaggttgagaagccacagcaggttggatgctggcagcagtgtggttgtgggattagctgtattcctgttcacagcctgggagaactggtacagggtcctcatctaaaaaaaaaaccctgcattctgccctgtagctctcaccagggaccacctcagctaccccaccaaggccggctgtcagtaacattcccaaaagggttgtatcatgagcacaccaaactgataaggatcctgtagaattctgtgcagagttttctgtcacacttgattttagggtgcaagttagcaacctcctccacagcaccacagtagcagcccatccctgaatttcatgatgttgactgtaggggcagctgcaaccttgtcctacccttgcttgctggcgtgttaaacacagatcttgtaatcctctgagacttggcacttcttcgtgtacttggtcatccccttctcacgttgtgttccagagaggtatcctccacttctgactggtcccgaatgatcgatcaccaggtctagagttccacaccaggtggggacttcacataggctatacagacaaacaggttcaacttacactcagctgcacatcataggaggtggattccttcatacactccattgggttgtaagtctttgcaaccatggcaatcatgttctccatgaagctcaaaacccactccttggagtggtgtgtgtgtgtgggggggcattcttccttttgaaagccatggtctgatcttacacaggtggtgctctgggaattacacagcagcagcctcgaacccctccttgacagctgtgtgaattctaatcccacatcttccagcctatggtttcaggaaagatgccccatcctcatgtcttcagcttggcgctgtgatgtggcttgagctgtggccaagaaactcaaacctctctcagccccacctctcttgagttagccagccatagtctgcttgctattcttacaattattaaaaatgtattttattattatcatgtgtttgaggtttatatacatatatatggcatgtgttatatgatagtgtgtatgtatgtatatacatgtatacacacacacatatatatgtatatatatatatatacacataaaatttgaacaggaatttactaaagaagtatttgttactgtgactattgaaacagaaggaggaatgcattaaatgaatcgtctgccttccctttgtcccaggcccgaccctgtggagagccagtgctgaatgggaccttcccagacttgagggacatgtgtagatatgcaagttcatctcaaagggtgtgggagcggtacatgtaccaggacacatgggtagaggtcagaggacagctgtgtggagtcagtttcctccttccacctttacttgggttccagggatgaaactcatttctccagacttgcatggcaaacagctttacctgctgagccattgcccgggcctggtagtgctgttttgctgtggccacaactgaagtacaggtgatgatgatgatggtgatggtgatgctgatggtgatggtgatggtgatggtgatggtgatggtgaggatggaggtaaaagagggtctagtgaagatggtaccctcccagcctggtgtgacatccacttatggtggcacaggtctcggcgagatgcccagtcacgatatcccctcttgccagtggtgggtaagctcatcgcagtcagagggacccgtaaggcacgcgctttgatcactgtcctgtggggcggtgttagttctgttggcctagtaaacctcccttgagtttatttgttcatctaggaaaaagtaaagggcagtcatgtaccacatagcgtacttagacatgatacacagttaggcgagaacgtcataagcgcttccacagacgaggcagctacggcatcatctggagggaggatctcaggggaccactgtgcgtgtcgcctggcattggccacatttccattactgactacatggctgtgtttgctactgggcagttgtttgttggcaagaagtgccaattggtggtgggcccatgggtctaaagctcgcacaatcctgagtgggcttcctgtggttggagctttgaaggagatatagctgcccacttgcttgagttagaaatggccagtctgggtggtctgtctgtcctttccatcaaggcttggcagctggcttgccctgctgagttgctctgctgtctgcctctccaattgtggttctcagcagcctctgagcactgcctcctactgtacccgaaccccgctgcctctctttgcatgtctgtttcctctgccccctccccaggatgtgtgactctgaacctgtgtctgcacatggttaggggaccatgtacttggcctgctccagactggtaaagttgttcaggacaggagctctaccttgttaaaagtcacttgaaaataaatcttgtgcacttgcatgtacacatatacatatgtatatatgaacacacacacatgcacgtgtacacacacacacacacacacacacacacggttctatgatgctgtaacaaattcccacagactaggtatcttaaaacataactacagttcctcatgtttctagagacccaaagttaaggtcagaatctgggagggctgctcacttagagggtccatgcggaggacccgtctttcttcctccagtgtccagtagcggtagcagccctccccgttcctcagcttgtaggggcctcacttcactctctgcttcctctgtgcccaaccctgggcttctccttggaaggacagcagtcactcaggatatgagccctaaatcagcatggcttaccttagccaatgacacctcagtggcctccactccagagaaggtcacattccaactggaaggacatggattttggggagaatcctgctggatccagttcataagtgcatctataccatgagccctattgagtattcctccgggcttggtgtgcctcaaagacgctgagaaaatgctgagccctgacctcttgctcttcatacttctgctcccctcctccctcagcgttaacccagactctcttgtcttcctttgcctttgctgggagccttgtgccttctgagcatccctctttacccagccctttgtaactgtggaaagaagggtttatcctggctcacagtttgagggtacagttcaccatggcagggaattacagaggcaggagcatgatgcagctggccgtactgctcctgcggtcgggaagcagaaggagtgcttatgttcagcttccctttcccctttaattcaccccaggaaccccaaacccataaaatggtgctgcccacacgggtctttcttccctaactcagtctagaaaccccctcgctgacatgcccagaggtttgtcttcaaggtgatgctaggttttgtcaagttgacagtcaactcccagaagtcagtctgtgcactctgtgtgtgacagcctgtctcaagaggctcgctcggaagccctgctggaaggccatatgcaggtagacaccctatgcgatctctgctctgttctttccttcctagttctttgtacctaagctttgagtactggtagggatgtggggtgtgctgggtatggtctctctgccctgtcttcctgcactcagaagaggggggcagagcagtaaagtagttaggactacgtctgggagccttgtcccctgggagccatgtcccctgtctccaccccgagaaccccggagtatggccagtaacctctctggatccgagggtgtatccttagctttgttctctgaaactaagttatccacaggaagagagtggctactcttgcttctgcagcacagcagtcttcagattcctctgatgatgttttgggaatgatgctctatggagtggtgagtctcactgctgagtagcagagaccatggaggcagctgaggctgagccgtttaaggctcctggggaggatggctgaattggaactccagccccccggtgcctggctcttgtttactttggtggcctgtgcccttgccttcagagaaggtgaggacggtgaaggatcttgggcgtaggcaagattcctcgcctggccctcatcccactccatttccgaaagtactcggctctatagctgtggaactaatgtcagaatacggagttgtggtcattggccaagagtgtgggccaccagacagtcacagcaggtccaacaggtattgcaggtcagagctgatacggaagtcatggcttcccaaagccagacattggaggataggcccagggtggagctcagaaggactttggcctccaaggaaggacagagtgcaggactcctagcacttgccacacttggaagctcctttggaagcatgaggagagacttgtgtttgctgcagatacatgattgggtcttacctcagcagacgctgctcaaatccccaggacgaactgggcagaggctggaagcttcacaggtggtgtcaggtttataattgcaaatgttagaagggagtgtacagcagcctgatagctgtgcaggcattgggatcccagtttcatttgaattctgaactccgttagataaccacatcaaagatgcatcaatgggcaggcgccaggattgttgtgccagcagtaagaggagatgctgctgctggggacgtggtcacagcacatcgggtcacataggcttacacagggaatcatggcatggtggggtcgcatgggacatgcatgtgcttgcttgctgcagatcatttccgaggtcaggtatgttggttagtgttcgtcaactgtacagaaacctagtcacgtttggaaagagggaacctcgttgaggaattgcctctatcagattggcctgtgggagctttttcttcattaataatggatggggaagggcccagctcactgtgggtgatgtcatccatgggtctggggttgtagaagaaagacagctgagcaagctttgaagaacaagcaagtaagcagagttctttcatggcctctgcttcagttcctgcctctaggttcctaccttggcttcccttcacgatggacagtgattgggaagtgtaaaccccatagactctttcttccctaagctacttttggtcatggtgtttgtcatagcaatagcaacaaattagaacagcaggctttgtgcctgcctggcctcatgctgggcacatgggatgccagtggatcgcatcagatagtttgcaggttaatgggtccaccccgacactaaattcttatgcatctctgtaccaagcactggaaaccttgctgtggtcagtgctgctcacagagctgactctccgaggccatgaagtcctcttcctggtaacagtctatgatgttaacatgcagaaaaaccaatgtgcagaaatctagattgtgagatgaaggtgtggctcagaggcagaacactactagcctagcgtgcaaccccttgcacagtggttctcaacctgtgggacccccttggagtccaaagaccccttcacaggggtgtctaagaccttcagaaaacacagatgtttacatgacgattcatatcagtttgcagctgcactggaataggcacaccaggtatcagaaaggcagggtgacagatcagaaccggagagactgggctccagtgtaatggcctcacactctacagatggtccctagtgtgtttagtcagtggctagcaaatctaactggtgttttattccctcctataagcaaagtgtatgcttggatcatagttcttagctctgcgcctttggacaggttcctttacctgccacagattctaaatttctttattatctaaggtgcatgcatgagtgtgtgtgtgtgtgtgtgtgtgtgtgtgtgtgtgtgtgtacatgcacacacaaatgaagggcagagaacagtcatggaagcctttgtcaggaacacggcccacctctttttacagagtctctccttgtcccagagcttaccagttaggccagcgagcaccagggttagaggcatgtactaccatgctcatatggcttatttacatttttactggagatcaatctcaggtcttcatgcttgggaggtgtactggctagtttcatgtcaacttgacacagctggagttatcacagagaaaggagcttcggttgaggaaatgcctccatgagatccaactgtaaggcattttctcaattagtgttcaagggggaaaggccccttgtgggtgggaccatctctgggctggtagtcttggttctataagagagcaggctgagcaagccagtaaggaacatccctccatggcctctgcatcagctcctgctttctgacctgcttgagttcctgtcctgacttccttggtgatgaacagcagtatggaagtgtaagccaaataaaccctttcctccccaacttgctacttggtcatgatatttgtgcaggaatagaaaccctgactaagacaggaggcaagcactttacccactgagccaccccccgcccccagtcctgtcgtccccacttttaaggttaatgtaaggactgaacattgtggaaaaaataatcaagagctgacagctggcacatgtcctctgaaagcagccgtggtggtgccggtggctgtgcctggagggtagggcacttagttgggttgctgtctctccaggaactgctgtgtctccttgtggactggggtcacggtggacggatgctctggacatctgtgtgccttttgatgttagagaagctgacttcattgctcctgatctagtagcccgagagcccctaacaccgccaccagagactttccccaccacatactcacacctgactgctctactccctgccgcctgaggtggattgcgattcctttacacactagacaggaaaggaaggctgtctagaacctggttctgatccagctggtccttgcctctctcctgcctgtgtggcctgtgctggtttgttttgtggagctgtgagacgtgggggttgagtgggcctttggaaggtgaataggagtttctcgcacggaacaggaaggaggagccagcatgtgtaaaggcatggctgcacatgtaccgggcagtgtccagggttcattctggctggggcgaggccttgatggtagggtggagaacaaggaaattggtgccagactggcagcctgcagggttgggtgtgactccagtgtgcagtagaataagtgtcttagggactttgggtgcctgatctttgagtttctgaaaacctacctcattccctctttttaggctgacatgtacccctcccccagctcatttgcagtctgcagacatctgacagactccttgcctaattgctcagggcacagaaggcttcctttcagctatttggcttgtgaaatgaggacttggaaggggatccgtctgttgcctctgttggaagccccccacccctctgaatgaagactgacacccctagcaggtttccacgaagtagttttgatgtgtagttatttgatgtgctgaattattaacaatatgtagcaagcgaatatgcaggcagattagccattgagcctcggtggagttgctggtcatctctgctccccccacttcctgcttcagtctgggtctcttctgcacccaaggctggagcccgaatgccgatccttcagcacatgtctgctgcctctcacccaggcagcagggctgtgggaccagacacagtttgggtgggctaccaagatgggcctggcactctgtggcttcatatcatctgctgtgtacaagcctctgtgcaagcaagtatgaattccagacttggggagctggctctggggccattgcttcttgaatgctgcatagtgagatgtaccgcttctcttggtccgagaagtttcatcttaatatttagtgtatactgggaagactgcaactagcctgggagctcatgaaatgtttcttggaataaggctggatcagtacacacacacacacacacacacacacacacacacagtttcttttgtttttttccaagacagagtttctctgtgtggccctggctttcctggaactcactctgtagaccaggctggcctcgaactcagaaatccacctgcctttgcctcccgagtgctgggattaaaggtatgtgtcaccactgcccggctacacatttagtttttaatagtcactccattttatcttatttattttgcaagtgtgcatgcgtaccacactgcatatgtgggggtcagaggacaacttttgggagtgggttctccatcaactgtgtgggttctaggaatggaggagaggttgtcaggcttggcagcaaacacctctaccaccaaaccaggcttggtggtgtgcatgtgtgtgttttaaaatcaaagaatcttaaaacttttaggccaagaaagataagttgtacaaagggtcatggaagtgttgtagagttgaccagatactctctggctactgtcagcctctgagctgtacaccagcactgggaatggcactttaggaaggttcattttaaagagtcaatgcaggggctggtgagacaactcagtcagtagagtgcttgcatgcaggcctgaggccctaagtttggattccctgaactcacatacagagccaggcatggtgttttatctgttataccaaggctgaggatgtggagacaggaggattcctggaactcctggccagctagtctagccgatcaacatgaactccatcttcagggagaggtcctgtctcaaaaaatatagtggagagtgataaaagacaccaaccagtgaccttgggaccctacattcacctatatgcatatgtacacctgcacaaacatgtacacacacagaagacaccagtgacccctgccttctacatgctgctgtatgcatgtgtgcacccacacaaacatgcgcacacacatacatactaagtggcctggtggtagagcatttgcccagcatgcgcaacacccacccatctgtccctagcatcctatgcacaaaagccagtgccttccgagtgctgtgtaagccttgccattattgggacaaaatacctggaaacttgaagaaagatgcactttagttcaccattctagaagttttaggtttcatttcaaaggtcagcctgaaggagacagagtaccatggaagcaggagcctgtgatgaagaatggggagagggagaggaaggggagggggaggagaagagagagggggagggagagggaggctccagtggtcacggtaatggcagtgtgtgtggtgggggaaggcaccttgggcctgcatgatcttaactgtgcttgcctatactctcttgcgcattcttaaaacagcactgcgggtgaggtgtcactatttaatctcattttgctgaacctgaggaactgagacaggaaattgaagtgcaaagctctcgccctgtacagttcacattgctctctggcttgtcccttttgtgtgtggccttcagagcactttgagtgtgagtgacaggtaggcctgccaacaaatagccccagcctggaaagcttcaaggcttaggctgtgatgaactctgaaaacaaccaggtggaggtgaggggtgggaaaccccagggcaggcatctagggaagctcactggctaggctggatctgctggactatgagtggtgggggttagaggaacaggatgtacctggaggatgcaggcagaggccttgagtcagcatgggcagcagtgtgtgatcttagtcctgtcatagacgtcttatgatcttgaggttaggtgaactcgctgagcctctatttaggaaacaggatactgacgcaatgtgtatagcacaggggaggtgctgtgtggttgctgctgtcactgtttgtgtgtggtctggtgtgaatatgccacagctgggaagaaagtgttgagcttggggctaaatgatggaggctgttgactgccaagccaaaacagctggattgtggctgcagatggcagatggggtgagaatggcagactggaagggatagaggcttctgggtaaagacccactttatatagtcttagcctttccttgctggttgatggagggccattagagtcagttggttggtcggtcggtctgtcgggtcagtcggtctgtctatctatctccttctcctgttcccccctctgtgtgtgtgtgtgtgtgagagagacagagagctgaggcccctaaggaagactgctctggtgtgtagctggggacctcattgtggaggcatcagtacagtgtggatgctgtggaggtggccaggcatgactgtacagcacacactgtcttttctctgtggtgtctaagaagatggatttacagaacagccttctcagaggtgccttttaatgattttgcatcctactgatatcatcagactggtttttctgacaggaaagccagtaggtttctgaaggaagccaaaatcgcctggccgaatgcagcagccatggctttggaggtaggcgtctattctcagaggcagaaacttctctgttcagcagataggccatggagcctctgccagtcaggctgggcactggggatgcagaggtgggcccttttctgatgttgcctgagagaagtttacacaggcacagtgaagggtctaacacataccactctgagggcaagtaccatttcccagttcctggacgcaggcagcctgtatcatttcattttcctttttcctgcctctattgaaagagtttttttacacagtacatcctagttatggtttcccctccctctattcctcctagttcctccccacatctcctcccatgcagatctgcctcctttctgtctctcattagaaacaagcaggattctaagggaacataacataataatataatataatataatataatataatataatataatatgataaaacaaaacctaatacattggaatagaacaaaacaaacaaaaggaatgaggccaagaaaaggcccaagaaacggatacagacacagatacacactcatttgcatactcagcaatcacataaaactcttaactggaagtcataagatatatgcaaaggacttgtagggtaaaaagagacaaaaatatataaataaaaaagaaaattaaaaattagatttaaaataaacaaaaaagccagccctgaaaggatgttatgaaagcctccagagacgttgttcagtttgttttctgttgtccatcaactgctgggcatgcggcctgcccttaagaggagtctgttgcaagtggctatcaattggagatagcttctgggttagcgattagggcacgcatgaacttctgtttcagttctaggaccctcttcggtgtgtgctgtgtgtgctgcctctgggagttcatatcttcctagatcctgttgatttacgggtccttgttttcatggtgtcctccactccttctgactcttacactctttctgcctcctcttctgatgctttccccgatccctgaggggagggatttgatggagacattacacgtaggtctctcactctctgcatattgcctgctctctttacttgctcctatctgccgcaggaggaagcttctctgatgatggctgagcaaggcactgatatacaaggatagctcagtttcattaggagtcattctcttgttatattcttttagtagaagagtagtatttggtttttcccagagctctgggctatcgagtctcgggttcttggtcactcaagcagtttcgggtatgtgttcccgacatggagagggcttttattcaaatcggacattggttggctgctctcacaagctttgagccacaccgcactatgtatcttgcaggcaggacaccattgtagatcaaggggtttgtagctgggttggtgtttatgttcctcctttagaagcacgcagacgatcttcctgtaccaaagatgctggcacttaggagtgagaaggctctatgtaagtgccagcttgagttctccatgttcagtcttgtcttcagcagcagggccttcctctcagtttgtgtagattaaccttggcaatagcctgggttgtatggagagtcccatgggaccaacaagggcattcccatttggccttcagctcaattagatgtagcccagttttcctatggaagctttatttggtgataagagatgtccagttggggctctgtctcctccattatctggtgattacatttagatgaccttcatatatgtatatattttaggaagcttctactgtattaggttttcatatgacccctcaaatggaccttaagtttagctgtttctctctgtattccctccctcattcccctattcactacctcttgccacatgatcttatttttccagtatctccccatccatccatccatccatccatccatccacccatccataactgtctatgctatttctctttcctaggaagatcaatctgttcttactcccaccccagtcccttactctatatctaaccactctgggtctatttattgcagcttggttatcattgacttaatggctaatatccacatataagtacatacataccacatttgtctttctgagtctgggttacctcacacaggatgacgttttcctagttacacctatttacctgcacatttcatgatatcatctttttaacagctgagtaatattccattgtgcaaactgtaccacatttcctttactcattcatctgctgagggacaactaggatgtttccagtttctggctgttatgaagagaacaacagtgagcatggctgagcaagtgtctctgtggtaggatgaagcatccttgggctatgtgcccaagagtggtgtagcttgatcttgcggaggattgacttgtgtctccctaaggaacatagtggctgtacaagtttgcacacggatgagtgttctcctcaccctgcatcctcgtcagcatgagctgtcactcgcttgatcgatcttagccgtcctgatggtgtaagatgaaaccgtagtcgttttgatttgcatttttctgatgactaaagagactgaacatttctttaagtgtttctcagccatttgagttctctctatggagaattccctgtttaggttttttgtttgtttgtttgcttgcttgcttttttccgagacagggtgtctctgtatagccctggctgtcctggaactcactttgtagaccaggctggccttgaactcagaaatctaccttcctttgcctcctgagtgctgggattacaggcgtgcgccaccacgcccggctttgtttagatctttttaacttgggtgatttttttatttttgttacctatttttgttgttgttgtttatatattttggatactaaccctctatcaaatgtgtagttatttaaaaaaaaacttttcctaatttgtaagctgatgctttgtccaaatgacagtgccctttgccacacagaagcttttcattttttgtgacttctcatttattaattattgatattagtgcctgtgataacggcgttctgttgttagaaagtcttctatgccagtgagttcaaggctccctgttgtctctacttccaggttcagtgtgtctgcttttatgttgaggtctttgatccgtttagagttgggttttgtatgggatgataagtatggctctatttgcagtattttatattccgtcatacagtttgactaccaccattgttggggaatagaaacatgaagactactctgcatgaccaaagtctgaattacgagtctatgttaagctggctggtgactgcctagaaagaaacacttctcacagagcagcctcaaatgagtattacagggggtggttaaagacaaagaacacagaaaaactatgtcctgcttggcagttgcaggggaagcaagccaacagtttaagaggagcggagaacatgcagttatctggggcatttggactccacatttttagaacagggtggatgctttctcacaggacctttcctggtatggggagaaggtgggtgggtgggggtcagttacagtttaaatcaaagatggctccagctgagacaagagagaagaacctttgctatgttatacatttgtcaaaggtgctctttttttttctcccagtgtatttctggcttaaaaacaaaacaaaaggaaattaaaaaacaaaaacaaaaaacaaaaaaccaggtgtccaaaggagtgtgaattatgtctgggtcttcagttttatttaattgatcactgtgtctttttctgtgccaataccatgtggggtttttttcttactactagagctctgtagtacaatttgaggttagagatggtgatactttcagcagtttggtgtgtgtgtgtgtgtgtgtgtgtgtgtgtgtgtgcatgagtgtgcgagtttccatatgaagctgaaaattgaccttttgagatcatgaagaattgtattggaattttgatagggattgaattgaatctgtagattgcttttggtaggatggccacttttactattttaatcctactgatccatgaacatgggagatcttcccatcttctgatatcttccctaatttctttaagttttatcacactagtcttttacttgcttggttagagttactgtagggcattgtatattattagagtctattctgaaagatattttcctgatttctttctcagtctgtttgtcatttggatgtaggaaggctactgatttttgtgagttaattttgcagctagctattttgccaaaagtgtttattctctataggggtttcctggtgggattttttttaggtcacttatgtatactatcatatcatctgcaaataaccatactttgtcttcttcctttccagtttgtatccccttgatctccatcagttgcctcattactctaaataagacttcaatactatattgaataggtatggagagagtggacagccttgtcttgttcccgattgctttgagtttctctccatttaacttggagttggctatgggtggctatcagcttgttgtaaatggctttattatgttgaagtatgtcccgtgtatctctaatgttttcggggcttttatcatgaaggggtgttggattttgttgaaggctttttctgcatctaatgggatgatcatgtggttttgtttttcagtttgcttatatagtggattcatttactgatttatgtgtgtagaactatcccctgcatctctggaatgaagcctacttgatcgtggtagatgatctttttgatgtgttcttagattcaatttgctaatattttattgagaatttttgcatctgtatacataagggaagttggtctataactctttttgttgggtctttatgtggttttggtatcaaggccactgtgaccttgtaaaacaaactgggcaacatccttctgtttctaagatgtattggcattaactcttcattgaaggtctggtgggattctgcactaaacccatctggctctgggccttttgttgttgctgttgttagacttttagtggctgctactatttcacttggagttatagacctgattaattgacttatctgatcttggtttaactttagtaatttgtatctattgagaaaatgatccatttcttttagattttgaatgtatatccttatgattctctgtatttcctcattgcctgttgttatgtcttcttcatctctgattttgttaattcagatcttctctctctgtcctgtagtcaatttggataagagtttgtcaatctttctggtgtttactaaagaaacaactctttgtttcattgattctttgtattgtttgcttgttctttcatttcagtcctgagcttggttgtttcttgctctttactcttttgggtgtgatgtcttctttctgttgtagagctttcaagtgtgctgttaagttaccaatataagatctctccatttttttttaatgtaggcacttagtgctgtgagtttgcctcttagaactgccttcattgtgtctcataagtttgggtttgttgtatattcatcatttttagatctggtcttttcataatgtctgagacttcctggctgttttgtgccaacattttttttttaaagagttaacattttctttgactgaggtatccatttcttctatggtgtcttcagagcctgaaactctctttcatcatgtgtattttattggagtggcttgcctctgaagttcctgtttgagttcctaagcttgtcatttacagatttcctccagtttgttgcttctgtttttactttcaggccttgaacacttttattcacttccttctactgcttgtgatcccgtggatttctttaatgggtttattcgcttcctctttaaggacgtctatcatatggcgatttgaaggccttcattttgtgcttaagctgtgtcagggcctaccatggtagggttgctgggctctagtggggacacagtgtcctggctgttactgtttgtgtgtttatgctggtggcatctgggtttacagtgattgtgactgtaggtgctgatgtttggtcttgccttgttgggtggttattttgtgtaaggaatcttgaagtcatctcaagacgccccaagaccaagttctcagcacaaaagagacttatttgtcccagagggacagagagcagggataagagacaaagacaggagataaaggaagggaagaaaggagagaggagaaatgggtaggggagaaggggaagggatatttgtcccaggaggacaaagaagtgcctctgaatagagaggagtcagacgtggcccataggaaaatggcagtttataaatgtgcaatggctggggaaaaaattcctaaacagaacagcattggcttgtgctgtaagatcaagaatcgacaaatgggacctcatgaaattgcaaagcttctgtaaggcaaaagacactgtcaataagacaaaaagaccaccaacagattgggaaaggatttttatcaatcctaaatctgataggggactaatatctaatatatacaaagagctcaagaagctggactccagaaattcaaataaccccattaaagatggggtagagagctaaacaaagaattctcaactgaggaataccaaaaggctgagaagcacctgaaaaaatgttcagcatccttaatcatcagggaaatgcaaatcaaaacaaccttgagattccacctcactccagtcagaatggctaagatcaaaaattcaggtgacagcaggcaagaatgtggagaaagaggaacactcctccattgctggtgggattgcaagcttgtacaaccactctggaagtcagtctggtggttcctcagaaaattggacatagtactactggaagatccagcaatacctctcctaggcatatacccacatgctccactatgttcatagcagccttatttataatagccagaagctggaaagaacccagatgtccctcaacagaggaatggatacagaaaatgtggtacatttacacaatggagtactattcagctactaaaaacagtgaatttatgaaattcttgggcaagtggatggatctggaggatatcatcctgagtgaggtaacccaatcacaaaagaagtcattagatatgcactcattgataagtggatattagcccagaaacttagaatacccaagatacaatttgcaaaacataagaaaatcaagaagaaggaagaccaaagtgtggatactttaccccttcatagaatagggaacaaaatacccatggaaggagttacagagacaaagtttggagctaagatgaaaggatggactatccagagactaccccacccggggatccatcccataatcagccaccaaacgcagtcactgttgcatatgccagaaagattttgctgaaaggaccctgatatagttgtctcttgtgagggtatgctagtgcctggcaaatacagaagtggatgctcacagtcatctataggatggaacacagggcccccactggaggagctagagaaagtaccctaggagctgaagggatctgcaaccctatagctggaacaacaatatgaactaaccagtacccccagagctcgtgtctctagctgcatatgtagcagaagatgacctagtcggccatcattgggaagagaggtccctaggtcttgcaaactttatatgccccagtacaggggaatgccaggaccaagaagtgggagtgggtgggtaggggagcagggctgggggagggtatagggaactttcgggatagcatttgaaatgtaaattaaaaaatatctaataaaaaaataaaaataaaaataaaatgaaggtgcaagggttgtgatgatgtgcctaattttaattggacatgttataggtgattcaaatgggacttttgattgctggacctcaataatttgatatctggaccttggtggtcagcctcaggagaggaattggccaagtgagggactcgaccttgggagttagctttagggatgcgatttaatggtttttaaccaagcagaggggatgggggaaaaggcaaggcttcccagccacgctcgctgtgctcgggctggctgagccccttcgttttgttcattagtttctgttgcccgctctgtcctcaggaggatgtgctggcggccctgtgttggttgctagggaattacactgggattctactaggtgtggccactgcgggttctagggaaaatgtgtttctaggtattgggaactgacacttaggaatagaggcagccttgggggataaaggaagtttgcagagcgagaaagtagcgcgtctcaccaggatcagcttagtcccctgggaagaggggcagagagccagggaggccatcatgggtagtctgctgcagagctgggcatgagactgggggataagatttgcaggaggggagggagagtgaagacctgaagctcacctacctgcttcactggcctactttcttctctggcagacttggctgctggcttcccagagggtacctgctggagttgggggctgggataatgggatgagaggggaggaaggctggggtgagcctagggaactggctttgaaggagaggagggaaggtgaagatttgtgcttagcctccttggcaggagcgcctcttcagtttttacaggcggcttttctttctttatgtaggagggctgcgggggatggtgctgggagtctatctgaaagcattttgaggcatctgagctcatgtgatactggcctgtctcctatgaagcaggggaacctgcagggccttagggcagcagctgtcgggctctctgcctgtctcgctcacccaggacttggcatagggcgggtgcttgcatagatgaggtggtgtatttctctaaagaatgtgggtgaaactggctgtggaggacttgagggcaggtgctagctgacatagggaggaagaatcattgcggggaatatggaaactgacaagagatcaaagtgcggataccagcaaagtccaactcggtgacccatgagttttgctgcggttacttatggcaatgtgggtgagggttatttacaggagcagaaatgactcaaagacagctgcatccccaaagcatgggtgatggcccatggacatctgcaggaatgcgactggttagagagcatctattccagcaagctgccccacctcactgtctctagcagttcttactgcttgcataaccttgaggagggagggctctggcacggctggcacattcaggggcttcctgacacttgtaaattgtttccttcctgggccataaggagcttctgtccaggacggaaggtttgaaattctacacaacactgggcctgggagtggccatggtactgtctgcagatgagctacagggacacacgagacagtttaagggacagcaagaatcaaggccccctcctgcagtgtaggcatctctgcagccccatagctcctccctctgctctctttccctctgcctggctggtactcaggacattctgctgagttgaattggtaaagaatgatggcattggctcctgatccctgttccttggtggacttgctcacagcaatcgtgtgtgtgtgtgtgtgtgtgtgtgtgtgtgtgtgtgtatgtgtgtttgtgtgtctgtctgaagctaagggatgtgtagagatatgatgctgatgtgtgtttcctgcagcccaagcaaaaacctgaaatcctcatttgtttaggagaaacaaatgcaaaatgccactccccatacaggaaggtctgctgggcctgagcctgaatcaggggctggaagtcagctggcctctgggccacgttgccaggtgacacagtcaccttgcgtgcactctgtctcagaaaggtgcacggaagccatcatgtcatcagtactcggtgcgcggagtttgctggcgtccagcagcaggtcacgtggtaaaccgtggaggctgatgggtggttactgagctgttgcagacaccagccagaaaaaaaaaatgacctgctactgggacccacttgtctgcaagaccggcttgcaatattaaaagatgtccctagacctacagctaaaacaattttataacaagaattggtgaaaggcatacatagttgtgtgcatggatcccaccttgactacaggtagaagcttggatggatgctaggctggggggacgggattggtgacagaaggacagtccctaaggaagatttcctttggggttggtgaggtgtgagcagggtgtgtcagtgccaggggctgctaggatcaaggctttagatgtctgctgaatgggagaggggcctttttttcctcagggctaccctgagagacatggtggctctggactgatgaccctcctcatccccctcaacacccttaccctctggtcatggaatccatccgttgcagaattcaattccacagtgccatggcctagcccgcagctgtctcaagtctccctcggccatgctgtcactgcatctgctgagcaccaggcacagcagctcccaggagcacagaactaaggataaggaaggagaggtcagagacagaggcaagcaggggtttctcactctaggactagcatgggcaagcccggttgatcttggttgagtgagtgactgaatggactgggtggaacagtgttattggggactccaggtctgtttgcccagtgtggcttctcagagggaggcacagggcagactgatggagctgtgggggaggagatctgtgactttggtggggtagggtggggagagagggttgcccctctgagagcagtccttctgggctgggatgtgctaggtagcccttgctaggacctgagagctgcagtgtttgcttctctttatctcatggttctgtttcctggcatctggccgaggatctgggtgcccgcattcattgagggtacccggtttgctcttccttctcttgggatgtcaccggagatcactgcagtcctggtgtcacaggtccttcctccaccttagggaggagtttgcagttgactcatctttaagcccagatggaatccaccctcccaccactgaggcctggcttttcttggtatataggggttaggtgtgctaaatatgtcataactcttgcctctgtggtgtgaccatttaatcccacctgggaagaagcagtgggcaagcctgggctctgtaaaccagtttaccttagatttgtagcccttcccacatcctggacaagcaggtctgctgtgcctcgtttgccttggctggccttatgattgacagctattggccggccagcccgcaatgacagagatttcttattatttatgagtgtttaggcattatagcatagacttcttcccaaccagctcatataactcaactaaccccttcattctagtcatgcttgcctcgtgacccgttacctttcattcagtccccatacatctgacttcctccatgtccggctggcaaatccacacacctgattctttcccaccattcctgtctctgcccagaggtcttgcctttcctctcctctgtggccataggctgtcagttccaaaccaatcagaagatgatggagaggaatgtttacagaacatgatgcaggtgctgagcaattagaacaacaataccaaagtcatgtgcaaatgagtactaagaccaggaacacctgagttggagtttgaagttgggtaggtggtaaggagaaggaaggcaggccaggaagaacatttcccaggcgtcaaggccaaactgcgccaacaaaggaaggttaaaagaacatttcagcttcatagatcctttagtgaaggctggctgggcctgtctagtgcccaagtcaggagcccagatgtccctgtggccttgtcaccacctcaacagatggctttcaagggttctataggcaggaagcgtagtcatactttaaactctgccggtgagggccctaggcacaaccattcatgtacatcattggccaggtctgttcacatgacgcacttctgcagaggagtctaggaagtgcaaggaaccatgtaggacatttccaaggtgtactctagggagcacctttgcaggcaagagaacacaagatggctttcaactctggttctggaagggtctgctctgctagaaaatcaacaaaggctctccttcccctgggtgcatcaccacccactttggggcatcaaccttgtgtctggaaagtggacccatgggagaaggagagcttcagggagcgtatggactcagccttccagaagggttgactcaggttctgtaatttgcttccaaacaactgggctcagtattggtcacatccccttagggcccgcccacccagccacccttccttcctccttccctccctcctccttagagtatgatgtggagtgcatcttcttgtgggaatggaacannnnnnnnnnnnnnnnnnnnnnnnnnnnnnnnnnnnnnnnnnnnnnnnnnnnnnnnnnnnnnnnnnnnnnnnnnnnnnnnnnnnnnnnnnnnnnnnnnnnnnnnnnnnnnnnnnnnnnnnnnnnnnnnnnnnnnnnnnntggagtctggtgtcctgttcctggaggccctgccagcagggccttgacttcacggttcccattccgttcctctgtgactgggtatgaattcaaaccagttccccaattaacaatgaaagtattggccagctttgcatacgagagagtcttaaaagtcagtgctttgctgtaggcaacaaatgattgggtctcgtgtcgtctccactctggcagcttctgtctccatgggtgcctctaaggctttttccacttgtgaccccttttgctggagtaattttcatgaccccaagtttaaaagtataagcacacaaatcagatgtttcctgataagtcatacaatatttactttgaaacaatctttttttttttctctttgatttttgagacagggtttctttgtatagccctggctgccctagaacttacttgtagactaagctggcttcaaaatcacagagatctgcctgcctctgcctcctgagtgctggaatcaaaagtgtgtgccaccactgcccggctttaaaacaattctattatgttcatatgattttagcatttcttaaaatgaaaacatttgcatactaatgagcatgatgggctttttatttttatgtaagaaattaaatattggctgaatatttgatattgagagatggagtagaccacctttaatatattttggagctcgctaatattttgattttgtaatcctcaaagcttcaaatggcactttgcataaataaatatatcatactgaataacaaaagcatgcttagggccacttcagaagttgtgaattctgccctaatcatgagtcacaattcatcgaatgtttctctatgaaatatgttaacaacacagacaggaattaagaaaatttttattatgcttatttatctatcgtatatgtgcatatgcttggaagtcaggggacaacttgcaggagtcactgcttgccctccgccacgtgggtcccagagactaagctccgcatccttacccgctcagccatctcgctagtcctagttatgagacttagacaccaatttgatattcacatgccaaacaatgaagataggaacattttaaaagcttttgtttccttactgaaactgttccatttcaagaagaacagaagtggatgctcacaggcatctataagatggaacacagggccctcaatggagaagctagagaaagcactctaggagctaaagggatctgcaaccctataggtagaacaacaatatgagctaaccagtaccaccagagctcgtgtctctagctgcatatgtagcagaagatggcctagtcagctatcattaggaagaggggccccttggtcttgcaaactttttatgctccagtaaaggggaacgccagggaagtgggagtgggtgggtaggggagcagggccgggggagggtatagggaaatgatctggatacatttgaaatgtaaatgaagaaaatatctaattaaaaaaaagagcaggcaataaaacagcggggagaaggagccatggtgttccctgcagcctctgcgggcattgcatggtacacagtgtgagtgctgggtgctcagagctagcattttgggctgtgtgaattcagatactattgttgccatttttctcctggctctctctgcagtttccggggaccccagcatggggcagcggctggctgtgaagccactgtgctctgggtggttgagttagagctggtgtccttagctgctgtctgcccagttgattattatcctggattccttgaatcttcttagcaactgattttatcttctactttctttctgccttttgtagcttaatgcttccgttttaagaggaactcaatttgttcctcgctctcaaaactatttcaggagaagcccagagtttgcaacatgtatttagaagctgtcttaagtccagtttggatgaacagtacactatagcatctgtatgggtcctacttcctctagtaggttgtggagtctggcttgccgcccctccccctcccagctggagctgcaggcatccagcccacagttctttctgctccagcaaactggtaactgtcagatcagttaagaatagaaacctcaagtttttactgtttacttatgccccctctctctttttaatgtaaaccataattctacaatatctggttttcatttgtttgttttcctatttagtctgaggacttgtttgtttatttgtgtttgtttgtttgtttgtttgtttgagatagtctcactatgtagcactggctggtttggaacccttgtagccagcactgaccccaaactcagagtgatccatcagcctctgcctcccaagtgctagggttaaaggcatacacgacactacaggtcctgctagactgggttttcgactcattgtacccttctctgtagcgtttctcttagccttcttaaaaggggaggtctgtgtggcttggccgatcctttggcttttgtttctcttgagtctttagtctctgaaaatgtcacagttgactgaattgcaggttgactttcttatctaaaccattttttgctccgttcctgccccccccacccccccatcatttctgcagagacgtctgctgaattcttatcattgtttttctgtagctgagctatttcttcttggccttgttttaggattttcttttccttcatctttggtcagctgcagcttgctgtgtgatatactcacgtgcaagtacaatgtgtgtacctatggttgggcgtctgcggttagttggggaagaccacacatagctttacagaggcctgtggctttttctctcactcttccattcacacctgtgttggctagttttagttcaacctggcacaagctagagtctttttagaagagggagccagattgagactatgtccccaccagattggcttatgagcaaaccagtaaattagcattcccccacggcctctgtatcagctcctgcctccagactcttgccttgtttgagttcctgccccgatttctgtcagtgatggagtgtgatgtgggactagcagctgaagtaaacccttttctcttcaagttgctttcggtgtgtttgagcacagctgttagtctagctaatacactgcctcctcactattttgcccttggatagtcttgtctctgtctcgttagtcttccattgcctttcagtttgaagacactatgttagtatctgtgagctcatggacagactctcttcagtttggaaatacaccattggtgcatctgtgagctcatgggctctttagctctgtgcagtcctgcagaaacttgtagaaagcttgtttgagttcctctgtagtgtgtgtgtgtgtatgtgtgtgtgtgtgtgtgtgtgcgcgcgcgcacgcaagcgagtgtatgctttaacttggacatctcgttatcccttcctggatttttcttctctacttacagaccatctgttctgccatgctgtctgcttttttctctgaggccctttgcatgctattcagaattactttaatgtctgagtctgggtctagtctttgatattttgttgagagctgggcctgatgcaaatggagctggagctgtactcgggaagtggttctctgctccgggccctctgtgggacagacattgctttgccctaagacctcagtcctctgatgatctaaggaagttccttatttctgttttctttatctatcttgggactccaaatttcttatgtgttggactagaagctacatattctgttaatttctcctaacatcttctcttcctcccttcctccatccttccctctcatgtgtcctccccaccctcactgggcagcacttcagctttgtagccgtgtggcaggtatttccctgactggagtttctcttgtttagtgggcagcaggaggagtttggactgggcccttggtggcaaggtctgttgtcccagggcctcagttgcttgttctggtgttgcttttggacatagcaggatgatcaggtcagctccatttcctgttatgagctgtgtaacctggtgcttggctggtgcatgcctccatttcttcttcatctgtaacatggatgacagaattttaccctgcataggagtaacagttaagtctggggtgaaagcatctgtttcagagagcggcactgacattggtccagagtttctagcttgtggacacacagtgcctcctgcctcctgtcctgtggtgtgcagtgcacacattgcctcctgtcctctgccacgtgcttcaagtgagacccccaggaagcctttagaaacagcacccacaggctgcacagaggtctgtatgctgtggctcacagatacactgatgaggtcctgcaacctcaagaggtcaggactagaggagagcggcacagtgtggtcctctgggggcatcatttaggaggtgagactctgcctgtaacatcttccaagtgattctatggtagctccagtgaactatgatagaccagacttgagagtggcaggccttctgcaggtgaggcatgtgcttagcgctgggatgctcaggctagggggacacttgctatgtgcttactcagtctcttttgtccctggacagactcgccagtgatggtgtgcacagaggacgagcggagccctgtacgactgcttagcacagccgagctggtagctgtactcgctggtgggcgggcgtgaacctcaggacctcagtgtctcactccaagaggaaacatgtctaaaaagggccgcagcaagggggacaagcccgaggcggagacggactctgtgcagatggctaatgaagagctgcgcgccaagctgaccaacatccagattgagttccagcaggagaagagcaaggtgaggcggggcctccggggccacctcaggctgggctgtgagcactgggctgtgaagagtgtaatcccaggcccaagcctcagatgcccctttgagtacaggagacagctgagaagacgacttggtggtagtttttaccatattctgcctgtgaccttggtggggcttcaagattctttatgtttcagcttcccttccttgcaagataggagtcacggtaggggctatgggcaagtcatctctgtgacaagagctttcttgtagggcatgtataagctttggaacctgttggaacagtacttggctggatacccacatccttcaggaaaacagtcaaggcacagctcttatgtcaacacagtacggtcaggggactccggctgtctggttcatagacacggtggcctccctctgattcagccagaccagcttcctgatcatggatgtgtgacttaaagtctcccagctcttgttctgagcttgcaggagatgagctagttcaaggctgtcctaaacgtctgggataacagctacaggggaataccccaccgccatagtctttgctgtagcagctgttgtgatatgggagggtctgagatccctcagagctgggaagtcacagctgcagatggattctgggggagctggtcacatgaccttcacagtcggaagctgagagcagttagtatgagccagtgttcagcttgctttcttcatagctatgcattctccattgctgtgcagccttgcacaccctggacagggtgctccccactacagaaggatcttcacatatcactcaatgtaattaagataatcccctcaagtcatgcccagaggcccatcttccaggcgattctaacgtctacctgttggtagttaatcctaaccatcacagatagtatttggacccaatagaatgtcctcattttacactaatctgctcattacaggtactcttacaatctaatgccgtcctaagactctagtatttaggactttagcttgtttgttttgtgagacataactgagcctccataccaggttagccctggtctagcaggtgctatactgtggaagacagacttgtgggggtctgtagtgagaactctggaatgttggtttctattattttaaaattttaaagatttatttatttatttatatgagtacactgtagatgtagatggttgtgagccttcagccttcatgtggttgttgggaactgaattttaggacctctcctcactctggtcagacctgcttgctccggcccaaagatttatttattattatacataagtacactgtagctgtctttagacacaccagaagagggcatcagatctcgttacaggtggttgtgagccaccacgtggttgctgggaattgaactcaggatctctgaaagagcagtcagtgctcttaaccactctccagctacaattttgatttcttaaaaaaaaaaaaaaaaaaaaaccccaaaacctcagactattttaagactatgtttttgtcttaatcccaggtatggagctatggggctgctttgcagcagttgattatgatttgtcttgtgctctaacagaggcatggttttgcccagctgcaaatagtttctgcaattgtgtgactttgggattctgggaatttttctgagggtatataaatgctagagccccaatagttggatagttgggtgggtagttgttggttgtggtttgttagtagtggtactcaaaggaaaagcaagaagaaaaaaattattcagatctcactctctcctcctatctagtgatagggggtgaaaccagaggagtaaaaggttgctcaaaggagcaaagaccagctacagtcaaagaagaaacaagaagaaagaaattagattcagagccgggcagtagtggcacacacatttaatcctagcacttgggaggcagaggcaggcagatttctgagttcgaggccaacttggtctacagagcgaattctaggacagccggggctacacagagaaaccctgtctcggaaaaaaaaaaaaaaccccaaaaaaaccaaaacaacaaaacaaaataaaacaaaacaaaaacaaacaataaaagaaattagatctctctctctctctctctctctctctctctctctctctctcctacccttctttctctcctatctagtgatgtggggtgaagccagggggataaagggaagggaaaagaactcataaagtaacaaagatcagcttcgggagtctccgactacccaggctgcctctcagctctgggacttgggatatttgccttgccatcttcaggctgctgtcccctcctcatcaccccctgtggtctgcatagggctttgcctgtttagtcactgagacaagtctgctctcagagaactcagtagagcagcccccaggccagcaggaaacgcataaatgtgaattgcacgatttcatttaggtgtcattgaacttgatatcatactcaccagcaaggtcatgttgatggtgtccttatgttagcagaggacaggcataaaagtctttggttgaagaaggaacatgaggcaaatgttcctctcaacatttgtgatggtttgtctattcttggaccagggagtggcaccatttggagttgtggccttgttggaataggtgtgacctggctgtagtaggtgtgtcactgtgggtgtgggcttaatactctcaccctaagtcagtcttccactagcagcctttggatgaagacgtagaactctcagctcctcttgcaccatacctgcctggatgctgccatgctcccaccttgatggtaatgcactgaacctctgaacctgtaagccagccccaattaaatgttgttgtttataagactttccctggtcatggtgtcttttcacagcagtaaaaccctaactaagacaccattcattcactgaggggcttatcctgagtactgtatgcagcctgctgtgagctgggacacctgatttgcatgaggtgactcagaagaggcccctcccctcaactggtgcagggaggggtggggtggagtgggggaggtctcagcacctgcagggcaagctgggcctgtgaagaccttagagctgatcctaaggatttctctgactggagaggaagtaaacagatttgcattgcatcaagttttcaactgcccccatgagcaacatgagtgttagttgggggcatggtgggatgagtgtctggctggcagggtagaaacctgaaaaggtccaaagtctgaagtcatatggggagcagtgatggtggagggaaggccatgcaggttctgtagccagacagtgatttattcagtcttgcagcaactagtccatactatactatttattcatcccgaggcaggaaccagccttggtctgcagaagtgagtcagactttgaccccagccataagggattggttggccttggtgggtggggtgggagtcttannnnnnnnnnnnnnnnnnnntccaggtcttgtgtgtcaggatcctgggctcttgcagttgctgctcttacaactcttagaccttggatgtggggacccttagctcttgggactcagtccctaggaactgcagcctctggcctttggcttaggaagcctgtcgatgccttctgctgctgtgttggtgctgtcttgtcttttacagtgctttctttgtgcttccactatcctgagctgtctcctgtctgggctccaggcagtctttgcccagtcactttctgtgactgtactggcttcatgaggatggtgctgtccctaccaccaaggcagcagcagtcaccacctctgctacctcccttaccagcttagcctgtcttacccacggtgaagctcacagaagacatgacatctcaggagaatctcttacaacaccagggagcagcacaggagggggtgcacccctgggtcaaaaagtgaggggtatagcccggttgtggggcatggcagggagtggcatgcaaatgtggtattaataatttctgccaatcacaacaccacttccagttctactaaggcccagttacaggctttgcactggctcagtaacaaactttcttgtgtgagggaagtacctacttctagtgagacagctgcagggtgatccaggtccttcacaaagcctcagggctgacgctctgttgtgttagttactcctcttgctgttgggacaaaaaagattctgatatcaatagcctaggggtagagagctttatggaggacatgtttattctgacccaccttttcaaaggactcatccatcatggccggggaggtgtggccgagcagaactaaaggttcatgtcagggaagcagaaaaaggaggcttgctggagactagctggagtcctctcttccatcttattccgtctgagcctccagtccatagaagggtgccctccagctgcagggtgggtccttcctccttaggtaatcctctctagagatatccttacaggcaactcccaaaatcctcatctccagggtgagcctaaaacatagtcaagttgatggtgaagtctaccctgtgtcagtatggcatggagacagccgccctttaaaccatagcattccatcctagaccgaccccaccgccccagctcatccacgatgcaaaatgtgttcagcctatatctgtggtctccaaaaccttaagacttccaacactgtttaaaagtccgtgttcaaagtctctctgtgagactcaaggcaatctcttagctatgaacccttgtaaaactacagcagacctatatgttccccaaatataatgggccagagccatgaaaggagccatggcaacagaacaaacagactgaacctctgagagcacttcccttctctgctgcgtgtgagcaggtccccagctcccaggtcctctccaggacaagaaagccttcttcccacatttctccctggaaacgctctcagtcctatctagatgcgttcctcgccatctcggagacaattctaaaccttgacagatttacagtgagaccatagcaccagagttgtctgaggcaggtaggctggagcaggacccgactcagctgcagtgttccttgcatttggacggtgctgtccttaagtctatggactgtttgagtcttgatgccctggcgctaagttcaccaggagagtgccagttccagctccaggtgaggtgatcgatgccgtccacctgttgtttctgtgattgcatgtgatgtcaggagatactagtctcatgcatctgcctcagggcagctattttgcatccaattccatactgggctgccagaccctctggcacaaggtaatagtggtgcctgccatcactgactcaagttccctgcccaggggcactaaaaaaaaaaaaaaaaaaaaagctaaactgtttagaatcttccttggcctctgttctctctttagtttcttgtcctttctcttacagttcagaaccgaaacgtcctcaaggtttgtctctccagagaaaatcataaagtactgtgggaagggagatggggatgaggttgggatggagctgtgggtgtggcctgcaggggaactagagggtggagacaggaagagcagctacacctgagggatccgaccctaactctggccactgttctggctgcaggtggggaagctgcgggagcgtctgcaggaggccaagctggagcgcgagcaggagcagcgtcgccacaccgcctacatctcggaactcaaggccaagctgcacgaggagaagacgaaggaactgcaggcgctgcgcgaggcgctcatccggcagcacgagcaggaggcagcgcggaccgccaagatcaaggaaggtgagctgcagcggctgcaggccacgctgaatgtgctgcgcgatggcgccgcagacaaagtcaagactgcattgctggccgacgcgcgcgaggaggcgcgcaggacctttgatggcgagcgccagcggctgcagcaggagatcctggagctgaaggctgcgcgcaaacaggcggaagaggcactcagtaactgcatgcaggcagacaaggccaaagccgccgacctgcgcgctgcgtaccaggcgcaccaggatgaggtgcaccgcatcaagcgggagtgcgaacgtgacatccgcagactggtacgtgaactctctccccacagcaccccttccttcaagcacaggggggctatgtgctccaggcaggcaagattggagatacaggggcgaccgcaaagtcctggctgttcccgggatggtagtaggtttagaatagcaggtttctcctagggtggggttctgggaagatttgtaaagcgagagaagtagtttccttgtctctatgtaggacttgtggatgggggcggcgggagggggggcagggctgaggtgctgtaagagcggacctaggctgtagaggaaaggcaggagatacagcccctttattcacttgaactggagtgggtcttacatttgggtgagacccagggctgcaccattcgggggaaatgtaaagtgccaagtaagcaaataaataaataaaaagggaaataaaaaaataaattaaaaaatttaattttatttaaaaagtgggagtggagtgagagctgttaagttgatttgacctccattcctgatggaaggagcccttcccagtaccaatgaccaccagccctagcctgggttcttagtgtaagcaagtggaggttttgattaagaggtgagtggaactttgagctatctcagcggtgacaggaagaagcagggctcagactgggtcagctcaccctggtatactcttctcccatccaagtacttaaccaggtccaaccctgcttagcctctgagcccagaccttcagcgtggtatggccatagactggtaatattcttcttagtcactgaagggatgtggaaggtcagtgggggcttgcagggcataatgtcaccttccacagtcctagtagacacaggagacagggctctgtacgcatacgggactgtgttgaacagctgtgtgcccctcaaggccctggtcagcctgcagcagggtggcacagcgtactaccacctcagctagcttagaatctcagcctgcaggaaggggtgatttttaggagagccacttcgaaggctgagggctgagttaggtgcaacgtaaagaaacaagatgatgtaccatgagcacactgaccccgagtgtggccagcctggtgacacagatgtgaaggaactacgtcaagaggtcataactgaccataggcaggagcagcacttaacagtgaagggtttgataggaaagcctaaaaaaatgtataataaatatttcaaagacaaggaggaggaagaggcagaccgctggctggagttggagaagaacctctctgggtacacagacctacccaggcagcccacagtgttgctctttgggaggtgacatctagcactttaatcaaaagtcatctgcgcttcaaactgtgagggttctcagcactaactgcgtcagtccacagagcaaagcatgccgtagatgaaagaaatactgggactcaaccatcttttgagctgccttgtcaggagacaaacaggcaattgacttcccaggaaggggcctggcaaggtggctcagtgggtaaatcacttgctgtgtcagcctgatgaactgagatctcgaggaacccttggcgggaggtgggcggcgagaactgatgacatcataccacggcacatggcttcccatacgcaaatacaattgtcatataaacacacaacgataataatagtaataaatattaaaatttcacctcccagaaagtagagcaaggaaaaccataaagaccaagaactgctgaagataaaaaccaataaagaaatcaagttcagtaattcagtaatgaattaaaattaaagttgatacagtgttcacagtatgtatgaaggggacagaggctttaagtcacgggtggggatgggggggggggaaagtcatgggggaaagggatgctgacactgaagacaccttggggagtgtagatcaatagtcaaggtgtagttagaggaagtggcagctagcccatcaagatcaacactgtaggatagaatgtcccatagctgtgcaggttgttgagcctgtagctcgcggcacttccacacttaagaagagcctaggtctggcgccttcacaggaatgtcttacacttacggaggaactaatgaatccttattgcatcagctgcgaggctgggggctgtgatccaacacctgaccagaagcctcttgagaaaggaaggactcatcctgtctcccaatttgagggtgcagtccatcctggtgagaaaggcctggtgggtggcaggagcaggaagcagctgcgcacactgcattcacagtccgtggaaacaaggagaaatgaaaactagagctcaactgacttgtgtttactcagcccagggtctccaccatggggtcactgctgctcaacacaaaggcgggcagggagtcctactttaattaaacccctggagacatccagaggtgagtttcctgagtgattttaatcccatcaagaacaggattagctcacacagatgcaatgcatccaggaagtagaaaggccctcaaagcccttaggattccatcgccagccagattccaaagcagtgacttgggaagaactagggagggagcactctctcttaagaacttagttataagaatgctaactaaatattaaccaagaaagaccagggctctatgaccagggctctaataaatcatgagccagggtaagttaactatgaaaatgtaaagatctagtatttactgatttaaaactagagaattttattctatctatctatttatctatcaatccnnnnnnnnnnnnnnnnnnnnnnnnnnnnnnnnnnnnnnnnnnnnnnnnnnnntacccacccacccacccaactatccatccatccatccctgtctgtctgtctgtctgtctgtctgtctatctatctatctatctatctatctatcttatctatctatctatctatctatctatctatctatggtgttttgagatggtctcactgtgtagccttgcctggcctggagcgtgataagtagaccaagctggcctcaaactcacagagatccactcatagaggccaccacacgcgcagcctgtgcagacgtcaacctgacagtgtaataaaggattaaaactcacgtggccatttttgtcgacgcattcaaaacattttaaaattcagcttcctggcagactcttagcatgtctggcttaaaatggagttgctctagtctgataaattgttcttttggaagtctgctaacaatgtttgtcataatgatgattcagttaaggtttcccactcaagttcagggtcaagccagagtgacccttctgttcagctcttctgttcagcatttcactagccaggggacagtatacagaagatctggaagcagtaagttctaaagatggggtgaaggggagcctaattatatgcaaatgatgctgagatgctgcagagtccagggtctgtcccagttcctccagtctgtttcttagcacagactgggcaatggtggttctcaaatgagaaagccaaggtatcactgggttctgtgtctgacaagtcacagtctgtgcttccaagatggcatcctcagagccatgtcctcaaacagttggcacaggatggcaaaagggaggcacacagtggcctcggcctctccttcaaggtcatcaatctcatgacttctcagaactaacaaacgcatttgtccaagctctgatacaaagtagacacaaaataactttcgtttctgggtactagaagtgaaccgctggaagggaggagacttttaattttaagaagcaggaaaaaaaggctccaggaacaattgtcaggcaagttgttcaggagttctgccaggctagaagggttaagggagagccaagtacgtaaaccatatgcattgatgagaatgcccaggaagggaaagctagaagccaagctgacttccctctgaggtaggtgtgtgtgtgtgtgtgtgtgtgtgtgtgtgagtgtgtgtgtgtgtgagcatggggggcggtgtggaggggtgtgggcatgactaagcgttgttttaccctgtccttatattcccagtgacagacagatcagtttgatttcccagagttcatcgagggaaccaataagtttgggtcgtggcaagagtgtgggtagccataatacagctgcaccagggggtttgtacccagcatgggtggtggcttctccatgcctgtgcagatggagacattctcaataacacccccatgcctgtgtgttctatctcctccccgaggccctaaaaccaagttctgtaagggcagaattgcctgccactaggaggagtggttggatattcagggagggttcagtgactgtccctgacctcccatgtggagatgtaagtggtcaagcccagctgtgatgaacttttgggagtagacggggcagacagatgaagatggtgtttgtgtttggagggtttcgctgtgcagctcggatattggcaaacagagtctaggttagtcactaaacccttaaaggagttgggatggaggatgtgtgtgtttgttcgagcatgtgtacctgtgtgtgtgtgtgtgtgtgtgtgtgtgtgtgtgtgtgtagcttcctgcttgctagacaagcatcctatccccaagtagaaacaggagggtctaggaagagacctctagatatgggatcacttgacttaggggcaggctgtctcctggtgcagtagggaaaggatgtcgtttcagtaaacaacactgggacagtgcggaattgtttctactaggacgtgtttatagccaagacacctcctacagtcaccggagtggctcggttaaaaagaccagtagtcccaagacatcactggaaaccccgtgtcccacagatgggagcattgtaaagcaaagcaatgagaacaagcctgctggtgtgggagcccagacccagccacattgctttctggaaaggatgagcaacacacttcccaaagaatgggaactcagctggaaggaaagctgttcaggcaggaaaggggaggatgcccaggaagatacgcttaggtttatctgtagcccttagtttaaaccttcagggattgcttaaatgaggcaccgcagtgtgctcaacacagagaagaagatgtctgacccagggatgggtggaacctgggccacgagcagattcacactcccagaaatctttccatcttactggggcatgagacttcgatccaggacaaacaacaaagaaacaaaggctcagctgaaagctgattgaagaaaggagttgaggtaccagaaaatttatgctcgagggcggtaagaagaaagggtcatagaagttcaggtgtgacaagtaggagggagaaggcagaagtaaacagaagacatctgtagttccctgagcacagagaaaccaaccccatttaaaaaaaaaagtgcctacagggaggtcaggccttcagcactaaggcccactttccctgaaggacaaagaagaattgctatgcaagtataaataataataataataataataataataataataataataataatgtgaataatggcatattcagttaaaggaatgcatgtctggtgtgtacaagagtttaggggggctggtgagatggctcagtgggtaagagcacccgactgctcttccgaaggtccagagttcaaatcccagcaaccacatggtggctcataaccatccgtaacaagatctgactccctcttctggtgtgtctgaagacagctacagtgtacttacatataataataaataaatctttaaaaaaaaaaaaaagagtttgggtggactctagccatgtgccaggagaaagaagtcaacccaaacctgagggtaaagcctccctatggtgcgactgtatctctaccatgcaggagaaggggatagaggagggtggcatggaggacagagcagaagctgcctgcagggtgggtctgtgaggaatgaaatgaaatgtgggtgcatcaattcaaagttatccaaggcagtgaccggcctgtacagtgattgttgatgcctgagcaaaacttggccagttctggggtgactgagatcatgtggtagttagctatacagaactgcaccatgcagggactctctcccaaggtctgtcgctctctgtacaactgcaccacccaccccgtgcagactgagcccagtgcccgaagccttgtggactcctgcactcagcaagaggttaagtgatacagagaaggaaatgcacacacagcagggtgtttgacaaatggatgtagcactctgctgtcttctggactggtcctgaaccaatcaagaatctaaagcatccggcaaaggaggaagggacgagtctctgtcatcaccagcagagctcggccagggaggaacaggtttggtaaagggcaggacagcttgtagctgttcctgtctgaactctgcagcagcctattggatggaaaacctgaacctgcagaataggtagttacccaaggcctgtctcccatggcccaggaagaggagaagatatagggaaaatcacccatgcttcaatctccatgccttggctccacattgttgattcacatcaagggtagtcatttcctcaccccaggaagccagacactttgctgggagagcgcttcccactgacccaccaagtgcagacatatagactttggcttgtttgtttgcagggtctgggggccagcagaaagctatgcagatgcagatattgactggttctgcttattagaaaaccagagtggctttttgtatagctggatatagggaccagtaaggcccaggaccagggcttcccttgtccttgtgacccccctctccacctttagttaacatcactgccagactagggggatgggatggctgtgggaaaggaaacccaatgacatttggtctccaggcggaagctggagggatgttgaatgccgctggactgggctaactcagtctagtgagagacacggaagtcaccattctccttgactcattccttgagctgagcacctggaagatctcaggaggcaaagagcagggaccctcaccaactgacaatggtggcacctacctcttgccccagcgagagagtcacctaacgaatgggctcagggcctttgtgctggctccttcatgtcctttgcccatctccagtcctgtcatgactactctttttagctcccatgccaggctccctctgaagaagacctcatgctctgggtcccctctgtaaggcaagctgcctgagaaccccacatagaccagaccccaagcccccttgtcacccagactcttctctgtcttcatggtggcatttatcactattttggggaataggagtccaaaatcaaggcagcgtcagtatcaggctccctctgtaggctctggggaaggccctcatctcttccaggttctggtggcagctacctgttcttgaagctccttggagtgtggctgactccatcgaatctctgccttcacccctacatctccccatatctctgccctgccttgtcttaaagacaccagtccttgtatttggtgcccatcctaacctgtgggtgtcattttcatgtctatcattgtatctgcacagatccgatagccaaggaaagccatgctctgactcagcaggctagcatagcatttgggggacactgttcacctgtgagaggtgccgagggtgacagtgataatggctgtagtagtagtggcttctgtctctgacttttgaatcttccaaactttgtagagcagtggagcccacagagcttcaaaagacagaggtaggttgctgcccaactgtgatttccactgccttgcacatccttggctctgccttccagaaccaggcttgcagtgtgaggaggaggagagggctgggaggagccaccagtgttctgccaatcagggcacacttgcctctctctctgagattgggtttgtgggtcatggatggaccaggtctattccacaggattctgctggtggtcacaggctgatgacctgctagtaagaacccaggttctatctgtggtcaagaggaaactccccaacgattggacccgaaagctttaaagccttcttggtctcctggggctggggctgtgagctcactaagtgctcttagttccagagcgagccttaggatgccaaacctgaggtgttaccaggaccatgtggtttgaaggctctggaggagggtcctttccatcttccctagttcttgggttgcccatagttctttgttccatggctgtgtgacagctgtctttgttaaaaaaaaaaaaacaacaaaacaaatcaatcaaacaaacaaacaaaaacaaccaccaacaacaacacatccagagatcctagagaaggtgtagattctgggtgacactctaaccaggaccgtgtcctcacagaaatacttccctaatggttggtttcccatgagtatgttgaaggatggtctggggttcctctgcaaacctctttcagtgtggttccctgctctatctggcctgccaggctaagctctgtcccctgtttggtgtgctgtcccagggaaggctggatttgactggactggagaaagcaagggttaagtatccctctgtacccaaagagagggctccccacacctggagaaggggtctactagaggccaagcagagtttaggtgtccagtagttctgagactcggattcagagggcacttaggattggggaccaatctacatttctgcatcagttgcaggtaggagacagtgagtagacagcaggaacagttacctctggaagaaatgcatctgggaggaagcagggtgggctggactgtttggggctgatagggagctgtcgggttaggggagccttaggacgctgagttgcggtgagaagtgcccataactgtagatcctcagacctagggctatgtcttcagtgtttgtgagattagaggttctgtgctgcacactcaggctaccccactcccagttcagtggacccagcctcagcattaatccagagtctgacagggacacccctctgatcctgagcccacacctgatggccctttttgttttccctgtaccagatggacgagatcaaagggaaggagcgggtgatcctggccctggagaaggagcttggtgtgcaaaccgggcagacccagcggctgctgttacagaaggaggctctggatgagcagctggtccaggtcaaggaggcagaacgccaccacagcagcccaaagagggagcttcctcctggcattggtgacatggcggagcttatgggtggccaggtgagggatggtgtcccctgctagccagaaagaagacctcttagctacatcttcccgctgctggtctttcctactctctcacactcccctcctctctggatccttcacaccaggatattcatgatatccgatgaggcagagaggaaggaagggggagagggaaggagggaaggagggagttactgatattcagtgtgtgccaggctcagcactcagcactgagaagatatttgtggagaactggctggctgagccggctgtggctggagttgcaaaaaattatatggaggtacagagagcagggtccacagctgatgctttgcaaaaaggaggtccctgggcaagacggagagtggcaaagtcagaggcccggagaccagcagggtttccccaaagtggcagggcgtgtgtgtgtgagtgtgtgtgtgtgtgtgtgtgtgtgtgtgtgtgtgtgtgtgctgggggtggcaactaccaggcccttaggaaaaacaggcagttgaagcaagcctgccctctctccctttcttcctctctgcttcatcgggtgtcatgaatgctctgtgctgagtgtgcatgaggtgctgatgtttcacagttgagcaagacagcctgctgtggaggaatgtactagcatattctagaaaccacaatggcatccagtgggttctcataagtttgcagcatgggtgggaacttcaacttcaatcctcctgggctggtgtttgaatcacaccgaggttttcagtctcaggcaggttgagatgaagtgtccccgggaggatgggacaggtatgcctgtccgtctgcctccatgtcgagcacatggtcctctagacggggccgtccccgttgtgtcttcaccgggtcttcagaggctccgtggaatcatttgagcttcttcaaagtttttttatttttaggatcaacatatggatgagcgagatgtgaggcgatttcaactgaaaattgctgaactgaattcagtgattcggaagctagaggacaggaacaccctgctggctgacgagaggaacgaactggtaaccacccaaaacatgtggagtctggacacgaggaacggactaggtccaggagtggatgcagaggggcccctgggtctctttactttctattccgttctctctgtgtgtgtgtgtgtgtgtgtgtgtgtgtgtgtgtgtggtgtgtgtgtgtgcgtgtgtgtgtgacactcatggaagaaatctctccgcttattgtctgtggagggatccatccttagaaaacagtgggggaagagggtgctggaatctctgcagggtttcccactatttacatcaacagaaagtaacaacaaacacaggcattcagtaccaaagcctcctgcacagggtctgtgggggtttccagaccgatgctgcacagtgacgaggagcagctgtcgccaacagggagactcctcacccttgagtcgcagggtggaagcagcgtacagagcaggctttgtagttgttttggatttggaaagctgttcttttaggtagtgtggttatgaatagctctctttttcctttatttacttggcataaaagttgatttatttctatttttaaaaaggatgagcatgcatgctggtagtttagttgctagagtctttgcctggcatgcaggaagccctggattccatacccagcaccccataaactgcatgtaattccagcctttaatcccagcacctgaggggtgaaggtaggagggtcagaagcttcaggttgtacttcagcttgtctcaggttgtgaggccagcctgagctaacgttgtgaggctagcctgagttacctggcatcctgcttcagatttctctctctctctctctctctctctctctctctctctctctccctctctctctctctctcttctctctctctccctctctctgtatgtgtgcgtaatgaacacagactagtttaaaacaaatcttttgtaaaactagtatttgcaagaatatgcttatttttgttatcaaaatagctaaactaattttatttttataacttctctctctccctccctcttttcttccatctttcttcnnnnnnnnnnnnnnnnnnnncctttctttcttccgtgtgtcatagtacacttgtagaatggcagaaatcaactttgggaagttggctctctacgtccagtgtgtgggtttggtaatgggagttaggtcatcagacttggcagcaagcacctttacctgctgagccagcctgccggccccagctttgctagttttccatcgttaatgcacaaagcttttggaagaagcctcatgaccttgttgctctttctaaccttggctgtgaagggaaatgtatcttcacaggtttagcagaaacaaaatgacgttcttcctagtgtacgggaaggcataccctggacagctatgatcagactgtatccccattatgtttctacttcttgcttaaatattcatgagctaaataaatactcatgagccacgtggcaatttactgtagcaaaacctgtaggctgcctgaacaagtctcaggtagaaagagtgaggtggttggcatctgaattccccacggtgcagtggctcctgacctgggtggttggttacacatttcactttagtaaacaaatccacacccaaagggttgacttcccacttgcaaagtgggattagtgctctgcaaggtgcgtgtagatttaccagtgtagccattcccttatggtatggtagtgtcatagccttgatggccacccttcctgatggccgttcaggctgctcctggcttctttactgtaataaataatgcaagaagccccatgcctgtctttactttagagggtctatagttatcctcttctgggtgggaggtcatacggtgcctttggtatgtgacagacagggtctgagtgtccagttttcacagggattgaggctgggtgctggggtcagcctctctgctggagtcttggttccaggactgtgactgtgccctcagcgaccacagggccacctctctgctcacattctggtgtacagcagagtggccatggccctcctgagcagatgggggtcttagtgagtgagctgaggggctcagagctaggccaggttcatggtgagggcttggtgacatggcggccacttttgtggttgctcatcgtgagtctgaagcagatgaggctgctacttcagttctgtagatgaggagacaagctacaaacttgaccgtggctgtgcagctggacagcgaccgagcctgcagttgcaattactgtgcttacaaggaaaaggagcggctacttttagccacggaggaccctgccccttctccccagtagccactgtgacctctcactagtctctctcccactgagctggcccccacaccacagattagaaccatggattgttctagaagttagatctaaccacaaagctttcctgactcaaagctgttgggagctaaggtgaagaccaaacggacaagagaggcacaaagggttttccagaggctgaacgaatagcagcccggaaagacaccccacctttgccaagagtgtttgcttggagttgtggtgaatccctccaggtcgtaggcctagactcacctccatgcccgggactgaggccagggctcttgtctgcagggtgttgtcctatggctcgctgaagaggggccgggaaagactaggtggctggctggattgacctctgggggccatgcttctgaagagggcccatgttgagaatctctgctggcctccgcggtggggcttggccacccgtggggctgtgcagcctcctgacccgtgtctgtgcctgctgcagctgaagcgctctcgggagacggaggtgcagctgaagccgctggtggagaagaacaaacgcatgaacaaaaagaacgaggagctgctgcacagcatccagaggatggaggaaaagctcaagagcctcacgagggagaacgtggagatggtgaggcccgcttcccgcctggctagactctgtggtccatgatctctgcccaccccttgacacctcagacgtgggctcagtgccggctggtcttgctcccctccacatctccacatgcgcactgccggagtgcctgctgcctcatcccctcattgtcccagaggaggacagggcagaatcagtagggcaggcttatccactggatggattatagcgcatgactggctcatgctttacgggcttccccggagacagttactgctgaaagggctgtacatgggggcaggttttccctctgcataggatgactggtgtctgtgctctggggggtttgtaagatactttcaggtccattgattagagtgcccatttcacagcttagaagactggggcccaggtactagtgtgggcagtctgtggtgaggagttgcctccctgcctatcttgccttctggcttttcattcagattagcccctgccccagccccaccagccattcctgtgagcatcactgaccacacctctggctcggcttcggccttcagctgtgtattccccatcttgggaccaggcgtctgtcacccccacccctgagccccacagcagtgctgtctttcacgctgtagcacaccgaagcaccctctctccttctggctgcagaaagaaaagctgtctgctcaggcctcgctaaagcgacacacgtccctgaatgacctcagtctgaccagggacgagcaggagatagagttcctgaggctgcaggtgctggaacagcagcatgtcatcgatgacctctctctggtacgttgtcactcttggctaagatgacaccacaggaggcggagtcaagagtgggcatcaggacaggagtgggacctgacagcccagcttctgacgctaggtcccctgtgatctccaggaagcagcctgagcttggttgaaatgagatcagtgctacctgggaacagtctccatggcaactcgcttttcagtgggctcttggcttgccctggtgaagaggcagcctggatctgttctgaggggcctttgagttattattaacttggattcattttttaatttagctattgcataccgggagtttgagcctgaaaatctgagctttatcatcagatcagagttggaaggaccagctgagactgtcatgagggcttcatagctgctcaggggtggttatgttgaaaggagaggggaaacgaacctgcagtagagaggggtgtcttattccaaagatagcgcccggcagtgcagtcaggcacatctgcagtgagcgcagaagcggagtgggctctgcttgctcacgagacctgcgtgggcatgatggttccatccacaggactctgaagggcgggaagccatgatcacatcctcagcgggttgcatgagaagcggtgcccgtcctctaccctcccctctctccccctgcctttcccacatagccagccatcttggcttcattacctagatgacataatgtagccaaggatgacaagacacactcaataaagagacaatgagtgaaaaggaaaataacaagccaaagcggggctggggaacagaatgaccagtctgccaggatctggtcagatccaggcccagctttgtcctgctggaggaaaaggagagtgtgctgaaagggagaggccctgggtccatctgggtccccagcactgccacccctgtctgcagtagaccccaaccaagcaatgctgcaggaagctcctagccccacacagcaagaaagaaacaactggagaaaattaagtcacccagccagtacaagggctgtgggggattccatcctggctctgtctagcaaaaagctgtaagcatccagctgctgctattgcaggtagaccctgccaaggccagcagaaccactgtgaggccacaccgcttgggcttggcagcctcaacccaaaaaagaatccaggttttggcagaggcaggcgaatttctgagttcgaggccagcctggtctacagagtgagttccaggacagccagggctacacagagaaaccctgtcttgaaaaaccaaaaaaaaaaaaaaaaaaaaatcgaggtttttctgtgatgagatggtccatcagggtgggtgacaaggacctgaacgagtgtcttgttactaggctctcagttgggtgcctgcagtgtgaactaggtcataccgatagagagctaagcaggcaggttggcgcactgaacctccttgttttaactgtgtggtcctgtgtgatgggggcctggttgcaagtggtcactggtggctgcatttctttgcaggagagagaacgcctgctgcgctccaagaggcatcgagggaagagcctgaagccccccaaggtgagcctgccacctcaagccagtcttacaggaggggagggtcacagggccagccacaggcccagagactgtgtgacacagctgtgtgttggctgtctcaaggctacatacattgtggcacagtaatgtgacccagatatggtaatttattcatggaacacttactaatgaaattctgtgtttggaccttgggttatgtgcatccaaaatttaaaaaaaaaaaaaacaaaaacatagatactcaggccttctgagggatttgaaggacactcagcctcattttatgcctcctaactctgtgttacgggatctcaggcgctttgttgagaggtgtggaatggagtcctttttgtaacatgtgactgctgtctcccagaggctgtctgggtgtgccatcaggagagagcagagctgggtggggagacttagaggtccccggggaggcttagaagaagctgtggtttgaatgtcagcccccctggccacctgtctgagatggatctctgctccttcctgaactggcacctggcagcttcgtcttctgacagagatggttagagaagtgcttctgggtaagaaaaactgcgaaggtatgacagcagatggccaaagacgtactccctggtggagtcagagtggcagcagggggtggtggggacaacccttatctggcccagaacacctaatctggcccagttggcacaaggtaggctgatggcgtcaagcattccactgtttaaagggaagcataagccttcacctcagagtggtggagaacgcctgtgtccccagcactggacaagaggaaatgggaagatgagagttcaaaactagccctctggctaattggtgagtttgaggctggcctgggctatatgaggctctgcgtcaataagccaagagatgagagaggggcagatccttacatgttatttccctaggactggctgaacaaaaatgggtcccttggaatgacaggaagttagtgtcttataatttgtgagaccagaagcctggcctcaaggtgctggtgaggccaggtctcttccctcaggcgtctcgtccggagggcccccttttccatttcctccagctctggggtgttccagtgatagtggccgttccttgcactactccagtccactgctgggtcacactgtcatctttagggacaccggatgtactgggttcagagcctatagtgcctcagtatgaggcgcttcttcaggacctcttgcatagttatctttgcattgaccaaataaataaatacatacatacatacatacatacatacatacattctgcagcagcacagtcaggaaggacttcagcatatcttttgaggggacacaatttagtcataatacctttatataaaacccaaggatttttaatgtggatgtaaatgtcagaatgcagagcgtgtaaaatgtgtctctgagccatctctgccccgccccgccccctccccgggtagccagtctgagttcagtctgtgagtctgagctcatggttgcttggattaattagtggtcaccccactatctcaattcatcctcagagccaccctggctcttccagttacgggagacagagatgtagagatgaggatgagccagtgggcagatggggtcgagcctcggactcactgtctccagcaggctgagctgagtcaggggcaggtctttgtgtgctaatcttagatgctcagaaggctgtgtatgatgctgcacgcctttaatcccagcactctggtggcagagggaggtagtttgagaccaagttggtctccacgtataacaagtttcaagccacctcagtcagggcttcctagtaagaccttctccaaaacaaaacaaaacaaaacaacaaacaacctcaaaactaaccaaccaaacaggaaaaaaacccggacaagtaggaggtccagcatagctgtttgcattcacagacctattgacacccaccttaaaaaagctggggaatagcaagtgatgtccccatggcttgtccccagggtgggccagagtctgtcctacattcacctggcacttagaatgtttactgccacgtaatctgctgaatgtgtgggccatacacttgttcagcgctgcaggcttgctcactccctcctgtggttaggaggatcgctgcagtacccccacacgatagccttcagctgattccagtaactgtgtttagtgactgtacaattatttgcctgccctttccccttctggggaggggggagtggcattttgctctggtggtaaatgtcactgaagtaaagtcactttgagcagaaagtctggctggttctggctggtaccatctccgtggttgcaacatgggcctgatggggagaaagcgccccctgctgccagaagaaggttgtgacatctgcaaacagtgcttgtgagacaggagttaaactactgagggtaggtagatggttggttcacactgcacatgtgtggcatgaaacaatccataattaaaggttaccaagaaacctgttgtgaggtaagattacttcaagcctacgtggcctgtgaagccttagtcccaaaccctagttttgaaacttaaaatgttctcagtatcaaataaaaaaaaattcaggttttggattctggattagtgatacttaactgataaagtctatttaaaaagaatcctgccactcagaaaaactcagcagttgtaagtacttgtgcttccaatcgtcccagataggggcactcggcctgtcttccactggtcctgatctctgaatctgctgattgggagagacattaacagcacagcacgccagcagtgggggaggggggtgcgtgggggggggtgcatctgtctccaaagagtgcctggcaccgagcagggggctgactgactaggtgcacagcctctcccgagaagtacgtttgcaggacattgcctacctcagagacgcaggggtgtgtgcgtacgttagtgccaaccctagaaggtcgggtgtgggaaagctgtacggattctgttttcttaaaggtaggattgcttatagcccaagttggccttgacctccatgtgtagttgaggctcctccggccccacttcctgagtggtggggttcctggcgtgctccaccaagccctgttttatgtagtgttggaggctgatccaaggcctttgtgcctgctaggttagcccttcagcagttgatctgcatccccagcccatgggaagtggcttccctcttactgtttcctgggccaccagcatctctttttctccagattcgtgtaggctggctttcatcccaggatcctgctttttagcccagccctgtgcagaccgggtggacaggcggctttgcagctttgggcttgagcatgattgtactcttccgtgccccattggtgcccttcaggcctggtgcatcctggtctcctcccacggctgaagtactgatggtttctttgtctttccctataagtgcccctccccccttttactctgtatggtgtatatcctaggaccatgtcaggtctccagcttcacagaccatttgaatgaattcattgacacttacaaaacttttcagaagcctcccagatccatccctgctcttgactcctgacacctagaccctagggaagcctctagactctgaggactcttgtattagttaactctcgttaccatggagaccaggtgtctgccagaaacaactttagggaggaagggcttgggtaggcttacagcctctgacggcactgtcaatcatgctgagttcgttgattctgggtccctcctgagccaacacatcatgggagcaggagcacgtggcacgagctgctcatgtgctgcacaggaagcagaggaaaggcatacaggaagggatcagggcagatacagtcccagagacactccctcagtgacccgcttcctccagccaggccccacctccaagtttctaccacctctccaccactactcaaaacctgaagccatctgatggctgtagtctgatagtctctggaggtacacatgactctttttttcctgggtgtttatatcagtccattcaggtggacagtaagattgaccatcatacaccctgatgcacaggtaatggagacagggcagtgtccccagtggtggtcctcatatttaagtggtctccacagtcctaaggacttagtgtcactctgggcttcccaggagcgccttctcccaccatgggattccctctggggcaagactatgctgactctctgtgcctcctgctagtttaggccaggctaacatcagttcctagtgagaggtacaggggaaaccctagttgatttcttgggccctgtcctggagtctagggacctttctctgcaggggtctggcagcaaggaggcctcaatatgggacaatgaaccggactgcaggctgtcagtagctgctattccatagccatgtgaattgaactctagcagagctctgagcacatgggtgatggggatcttgggtgtagctgagagactgaggcctggaatgttgagcagtcagccccagcacaaactctgaggcctgagacaagggcataagctcctagaacctgcttcctggttctcaaaacgaaatcacattcagaccaggagatcatactggagacctggttctgtggctgaccatagttggtaatcaagaaatgattgtgcctccttcctcccctctttgtcttagaaccttagccttgctgcatgttctagtttgctttctattgctgtagtaaacgccatgactatgggaggaaggaccttgattcagtttacgggttacagtccgtcatcgagggtggtcagcacagaaactggaggcaggaatctgagcagaaactgaagcagagaccagagggggcttttagctactggccttctctctggcttatgctcagctagccttctacaacacaggacctgctcaagggtggcagtgcccagagtaggctgggcccctcccacattagtcaccacgagagttcttcacagacgtggctacagggcagtcctatcaaggcagttctttaattgaggttccctcagacggttcagggctgtgtcaggttgacagaggaggcgagctaggttattgtggctgggccaaatgcagatgctcaggtccccgcaatccacagtgtagcctttgagacagtgtaagtatcctatggtggtgtctacccaggaaggctgcagagcctgctgggccacgtgcctgagtcccctcttctctggggaccttggcttactgccagcagtaagaagttcatgcctgatgtctggcagatccttctggcgcattgttcctgagtccactctgacatcacatctaggagccctacaaaccaaaacctgtgcctagctgcttgtggagggttggggcagaggaacactgggcacttccggagcagactctgctgtggagtgacttcccgcctaagacaccctactggttttcagtgtgatttttgcttctcagcagccaaaagtgcttctatccctatgttagtttgcaactgaacccgtttgtcgtcagtccttcgccagctgttgccctgagagcttctgtggcttcatcctgccctgtgtgtccctgaggcacgacggtagcatagcatcctacaagcctagagattcagaacggcgactgcatgaagcggtcagattttatgcccaacttcaatgcaaggctggtccttggcccttgtggtgagaggtttcctagtggcacttctctaagggctgtatccctaagtccaaccctggcctctgtctgggcgagggactgatgacttccttatagctcaggaatcatatccccctcccccaattctctgtggtggtttgttgcaggttgtgtacgagctaaggtaaataaactctgagagccacacttcggggacaacaggggctgcgtgtgccaggacacccacggctggcggtggattagtttgaagatgtcccaggcaggcgagggaagagatgccccatcctttgtggctctgggcctgaagcagaagactctcgtcatgataccgttgctactgctgtgcccaaaggctttgcaactatccagggacctgggactgttgacaacagttctgggcatagggagattgggtcctaggagagaagtccccagaggacatgcaggtttagaagctgtgctctatgacagatacctggggctggcctggaaactggctgctctccattgatagctctgtcaccggcatctaggagctggtccaaggtgccaccgctgttgccaagggtgcacctttggggcgtccctgtcctctggcttctgctgctgacactattcaggaagctgtgaggggcaggtgtgcctgttttctggggctggagagaaggcagggatggcctgaccagccagtacaagctagttcctgcagcatccccgacagacatggagtacatcctgtttgtgctctacttctccttcttcctctgcctctgcgccctcgtgtgcctgtacttctctggctgccaggagatgacctataagcatgaaggtacgcagctgcctaggatgggagggtctgtcttggtgactcctggctgccatctgaaggtcctagatcttctgggcaattttggctggatgctgggacggtgcagagaagagctggtgagatgctgggtccagtggaggtgtgtgtgtgtgtgtgtgttgagtccagtggagaggtgtgtgtgtgtatgtgtgtgtatgctgagtccagtgaagatggttagtctgtctttgtctgtgtctgtctctgtctgtctgtctgtctgtctgtctctctctctctctctttctctatctctgctgaatccagtggagaggttagtatctgtctgtgtgtgtgtgtatgtgtattgtatgtgtgtgtatgtgtgtatgtattatgtgtgccaagcatgagcttgtgtgtatgtggagaagaaagatttgctctaaaagcattttggtcaaaattacacacacacatacacacacgcacacacaaacacgagcggctcgagagcgcacaaggtctcacgtagctcactgtagctagcttcaaacttaaccatgcatctgaggatgacctttgaccttgaatttctgactgtcctatgtgtcctgtgactcacagctgtcagctcttcgccccacagccatgcatggcacacttggtgtacaccgacccagatctccatgtattactagacaagcaccctgacaactggactacaccctcagcccccaacctatgttttaaactttggatatctttgtaaaaatgacactggctggactgacttgtgttgtaagcaggatgggtgtctagaggggcaagccccttttcacagtcagcacacttggtgcctgtgaattgtaggaacttttctgcccaatccaggaagtttagaattaagggccacaggccacttggcagcagacagcgggcaacatctcctgatggccctcccccgcccctcgggaagtgagcgtgggccacctcagcgtatcgaggaagcagccagaacaagtttcctgctctgaggacataggcactgtgttcactttaaacaccaaggtgacttttctgttttgtgctcttagtgaggctgtgctgagtgggctggctctgtcagcttctctgtcacctcatcacctagacaaaggagctgtctgcaggcacacacctgtaatcctgccgtttgggaggtaggggcatggagggatggagtttaaggcaagcctggactacatgagacattttaaaagaacacaaagcaaagctgggcagtggtggtgcacgcctttattcccagcacttggaaggcagaggcaggtggatttctgagttcgaggccagcctggtctacagagtgagttccaggacagccagagctatgcagagaaaccctgtctcgaaaaaccaaaggtggggggaatacaaagcaaaaaggaacctctaaaggaggcaggctaggccacccgtgtgtcctgagagctgggcagttggcactggataccagctagctcctggtagctgaggaagtggatggaccatgcatagttactgattcccctccattacaacaggatttcactggaactattggtttgtgctggcttcctccctgtaagtagcttctggcttcccctggtataacgtggctttctgcagccccagtctagggccaggtctactgtgaggctctacctgggcctaaccttgtcctattcagttgggagcttgagcagttgaaaccttgtgattaggctctgtcattgagcgcttcattaaaagccaccctgttcttcaagagcagattagcctaggcaattgacctgtgttactagccccagaaacttccagaatgctaacagcggatggtcgtagtccaccaccacatcctaatttggggaagtgtgtcattttaggaccttcctggggcccacttggtagaagggggagcagagatgtcactatatcaggctactagttagcacagccaacacacagatctgtccccagaggacaggcaattagcagtgtttatgaaaaataaggttggctgggcagcagcccaagggaacagggatgtggagctcgagtcagagtgcgctgctggtgtggactccactgcttcctgttgtctccaatgcctgcagtggtagggcttcctatctgatgggaggggagatgctgaaggccacttggactatatggagcctcacctggtctcaccatccttcctatcagctgggtacagaggcaggtggatgcccagcagatgctggccatgtgaaccttcaaagaggtcacgagcaaaccccacaccatatgaggaacattctggaggggaatgcttgcaggggcctggtagagcctctgtagaaaaccctaataactgtccagagtgactgagaagtccctccctgccccttccctgcgatgtcaaagggacttcctcatggcgttgttgctgggggctgcagcctctatgttctcgtatctgcacatacatgtttgctgccatagtggcttgggtgtagggtacaccctgcctcctctgtgggttaaggagaggtgtgtgactctctgggagtccctgggagcccagagctgatcgctgcaatgaggctcctgttctctcacagtcctggaaagcacactgattgggaaggcaagggattccctcgagcagggtgtttggaaggagaataaagagcagtgtgccttgagccaggaagaggggtgcatgtggaggtagatgggtgatggacacagccctctggggctagtgctccctagcaggtaccctacctggctttaatcgtgtgtctccaggctgagcctggtctggctcactgaagctgctcagccggtgattactgaacgagtgaatgaatgattgaacaaatgagtgaggggagcctcacatcctgtgcagtttggagtgagagaggtgtagccaaaagattctcaggtagttggcaaacaggacagaaagatgatctgaggttatgagtacagggcccttaatgttattctttctaattatgccagtgctctgaatgcattgtcacccaaagctaagaggaatcacctcttaggccgagctgccggggaagatggggtcagaattctgggtctcctaatcacatctcctcttcctggcatcccatgtatctgctccttctttggggccagacatctcactcagcctgtagaaagctctgggtgctgggacttagctaagcacagagtgagtgaggtcccctcttacgctggaagggggcatttcaacagttttcaggagggacctagagctcagaggacctggcatttaaagccaactgaagagttgcatagccccctctgcctatgacccctcctgccacctagtgatcattgctatgctagccgcatctgcagcagacttagtggctcgctcagtcctgagctggctgtagatggggccacagctgcctcagcctcagccccctgtgccctgggctggccgtgggtaggcagctgctgtctttttgacctcgtgctccttgcctctcacagaagcatgttgtggagacattttttggatttgatgaggagtccgtggactctgaaacattgtccgagacgtcctacaacacggacaggacagaccggaccccagccacgccggaagaggacttagatgaggtaagcaaagtgcaatatgctagggacgtcacacctttgtcttggccagggctgctccctctctgctggtcaatcctgccatgccttagagcctcagagcaaggaaagccaggcctcgctgcctagagagcacccagtgagcacctccctcagagctgatctcctgggagacttaaggctgctagagcaacacccagatgctgcccccagtgctgcttacaattgcaggtaaaattacacgtctcgtttcatatcccccacacataggtgacagaagtggtcacagttggtgactttcctaaattataggcagtatttaatatagactttcccctggtgctgcagctcacaccaggcttcctctgtgtgtctgtctgtctgtcctctgtgcacccctcagtggcagtcccctgagcctgggtgagaggggtgcactggccctggctgtggcaggtgctggtggagctttctggtgtcacatgtggcctattgggaagctccatgcagctttctgcatgagcctaggattgcccgtcctttgtctccttgtcctagctccttgagcagctgcctctcacggtcccatggttcagggccattcaggctctactatggagtgccttcttgaatggtgtcaggaccctcaggaagatggacccttcctccaagtcagcccactggccttaaattcagttgcttatggagtggcctacccatatgggaaatgccacgggtgtcacgtcctgtctgagcatctggctaaaatttggtccaatatgatctctggtttttacaaacttgtcatggtacccccaacagtgacttgctacattagtcaccctgcactgtcctctcatgaccacaagggggcttcacacagaggtgctctccagtcacatgccagagcagaaactcccagactctcttggccagaaggacacccttctcagggtgagcctttacctgtcgagtcaggctggctcccaggaggcctgtgagtgctggggtggcgtgctgaagtggaggaggcattttctccaagcagccttcactccaggtccttcctgttactttctggtgtgacaagctcactaggcatttgtagacacgctggagagacgtgggcatttactcgtgttttgactctgtcccttggagtcacatgaagtcacgaattgacttgtttgttttgttgttgtttggttaagaccacaaccagagaagaggctgacctgaggttctgccagctgaccagggagtaccaggctctgcagagggcttatgccctgcttcaggagcaggttggggggacactggatgctgaaagggaggcccgggtaagtgtgtcccctcgttgatggggagggacagagactggggaccaggaggggagggacctagaatcttgaaactgagggaggtgaaactagaccctccacttttcgtctgccgtctgtttgcaagagagaagacttacagagttgaaggggtaggggcagatggacagacaaacagctgaaggacttgatgccaggcctgatgaccttagttccatctgccgaacccacgtggtagaaaaagaactgattcttgccagttgtgcttatgacctccacacacacaaacacacacacacacacacacacacacacacacacacacacacacacacacaatgagttaaaatagaatggaatttgaggaagtgatgaagttacagactcagccagcctttcacgcttcagatctacccttctccctgtagagccaaggctcctcccccctcatgcccagtgtcttcaggaaacactttcaggagttcttggagcacccaagacacaggtactacaggttcaggaaatacattgtggtactgggatgaacttttctggaaacttcctcccgctaacccttctcccaccttgaagtctatagtatttgcatgtccctctaggagttccagagacaccagggagcccatgctggtttagtgctgtcccatgttccctgtctcactcccatagccctattagctgggatgaatcgattccatgtcctgcagaaggaacagagactcaggaaagtagcaacttgcttgaagatgcccagatggtccccaacataaccgggatctgggactgtgcaactctggctcagaatgggagccccatgcagacgggcttgggtgtcctaaagcatacatgacactgtggtttgtaggtctcaagaatatggaaggcacgggcatgagcaaccatctccagaatgaacttggcactcagggatcaggatggtatcagtctcagggtgtgggtggggcagacacacagggaacaggatccccaggggatgtagccatttctgccataatgaatgaccagtctttctttctggaccacagcaggaaaacgtctaggctttatctgtgcttaatttcttcttgtcttttaatgtcatccacttgcccagttaatggagatttcacagtgaaatgcacagtgggacatggtggtatatatctgtagtcccagcacttggaggctacagcaggaggattgccatgacttggaggccagctagggcaacatagtgagtgctaggctagtctgggccatagtttgagaccttgtttcataatttaaaaagaaaagggaaagaggtagattttcccactttccagatgaccttgaactcctgatacacctcctgagggccaagatttcaggcctctgacaacacacctagtttgggttcctgacatctggaaagcaggtcacatccgtgtcttcacattccccgtgtcaatgtgtggctgtagccaagtagctgtgcctcctgggactagggtatgtgcctacgctgtgccctgcctgctgcttcttgctgtagggtcagctgatcagtgacttccttgatgacttgcctagtttatgaggtattaggtttcggtctttgctgtaggtgacagaaagccccattagacccccaagcaagtagaacagctgtcagcagctggatgctgctgaaggagaaagcactgaccttgtcagagctggctttgggaccctgaggcatccagtttgggcaagttcatcccagaagagggtggctcttcttgcaggctgccctttgattgtcctttactgggggagttagaaccatcaccccccccccccatgaccccttacttcccactgcaggatgcggctgcagatggacttcagaacgcctcaagtggttgtgacgtgagcatgcgtgcaacaggaccctcctaccctcaagctctctggctgcggaggcagtctggtcggcagcctgactcgttacctctgcaagtgacttgctcacttcctggtctttctacttccagactcgggagcagcttcaggccgacctgctgaggtgccaggccaaaatcgaggacttagagaagctgctggttgagaagggacaggtaagcaggaaggccatgcactctgtgatcctcatggctctgtccccatggtgtccccggggtcctcatggctctgtccccacagtgtccctgggatcgatgttgtctttggtgtgccaagggtaaggggcggttctgtggaggaatccctgtgaccccaggtgaacctgtgttgccacagtcagagcgtggtgccctgaaagcttgcctggcttctcctcggttgcccacatcagaaaagcagaaggtaactctcagagcagagacgcagccagaagctcttttgactggggctggagcctgaagaaaagctgctgttttctgtcaagattttaattgcctgtgcgtaattgaagtgctgtgggccacttggcagggcccatagcaaagggctgaggctgtgactccgccatgggagtctggattggttatctgcatggactcccctctctgatttgcttagtccaggcccagtgggcatcaggcagagagaggcagccctcaggcctttcttgttggtgcctcttgtaagcagagggttatctattttacacggttccctagggacccagtaccagaggtgccatcttagaacttatttcctggcaacagtcagcgggttgaggagactttcactgcctcagaatagcttactggcacaaactagtcacatggccccatatgggtctataaaaggctggtgcacaggcacaggcatgggtttctgtaggtccttgctcctgctctcagtgagagactgaggcatatggaaaggtctctggcctctctctctctctcctcctctctctctctctctctctctctctctctctctctctctctctctgtgtgtgtgtgtgtgtgtgtgtgtgtgtgtgtgtgtgtgtgttgtatggtgtaacaagctgcctctaaacgtagttgcttaaatagtagggtttgatttgttcggagatctgtgaattggtgccaggctgggctctgtaaatggttgttctgttggtcttgcctggattgccctgaagcttcagtagtcaggcaggtcaaatggggctaggcagaagtcaggtaggtcaagtgggactaggaggccttaaatgagatcacttgccacttgtggtctggttatccctcctcccataggtgttctggcttttttatctggtcgtctggggtgaggaacccccttctgtcaagcatcacgaatactgaccaggcctctgctcgcatcacattcattagtacttgagtaggcaaaacacatcacagccaagcccagcttcaaggctggagtaacagaccccatccctttggacgatgagctgacttgcaaagcatcttgtacacacagatgtggagcaaaggtcgcagccacccttgtgaccagtccaccagacaggaaggtggatggacacagcgctatcttctcagggacttgcagccacacaaacatacatgcaaagagcatgtatgcaaatgggtcagcagagacacagggtattaggtagaaggccccaggaggtgaccttcaaatgtcttctgggcattgcacacctgttggtcagatcctaggtccgccttggctaacgagcattgctgaattccaacactgggtgagactggctcggctcctgtggagtgggaatggggggcaaggtggaggggatagactgttctaaatctaggatgggcaggatcaggaggtggaagaggaggaggaggagggaggaggagaagaagggagaagaagaggaggaggtggagaaggctcccttacctcctgtatcttccccctccagtctgatgctgatgagggagagccagtgttcgtggctctggcctgacactgaggatgctacggtgtcagcacagaggctgtgctaatagactccatgtgagtggagttgagcaaagcaccagtggggaggtggaaagcccttttggttattcactcagccatcacggagcagtgtcctgtaatggcccaggggacctcgagcctatggggagagagctaggaaagaatgacatctcacacgtggggctagggggccttaaataagctcactcacctcttgtggtccggtcacccctcctgctgctctgtgctctcaggacaattggaagaaccctgttctttcctggctgtgaaggtttagaggatgatgaagtcacacagccactgtccatatctgggagttggtggctcagtcaacacgggaaccagtgaataaataccctgtatttcctgcaggacgctgcgtgggtagaggagaagcaggtactcatgaggacaaaccaggacctgctggagaaggtatgctcaggccagagcctcagcttcatgaaccgaaccacagaggccaccaacctgccccaagccctcagtacaccacaaagaccagggctccatgacatagtagttctcacaggagaagggtctttcccactggactcagggtctgtcttctgggacataacccttaggtcttagaacctttagtgtgcctctacaaaacaggaaagggtgctatctccctttgctgttgatttgggagccttcctattcctcatggggacacctgaggcagacagagtccaaggcaggtcctcaggttccctcagctggctcagttcttgtattggagcctatataccttgcgaagtttgaagggagttggtctgaatgtgcgttggcatggagattagtttttccttgcttggatgggtccattcagttattgttaaagtagatgccaagctgtgctaccatgatcccagtgcccatttagagcagtttgagcctccctcccccatgcctgtttgcagtccttccttctccctgctttctgagtcccagtatatttgagctgtgtgatcagtagactcacgccctatgcacacttcatgccagcagaagagaatctagggtggtccctgggtcttcagcatcctgaaagcccaggcctgaaccgccaaggcccatttctcaggaaggtggcctggatctggcccagctctgctgtgtcaccttccctgaccttatcttccttaaggcattgaggggtggctagtcttggctgcctggtgggccctgtgtgtcaggaaggctttaatggctgttacctcagtcccacaggccacacaagaaactcagtgtttcctggtgtctcctggggttgatagcccttctttggtcttctgacagaaggagagagaatagctgccacctggagcgctcacctgcacatactggtggcctctctctgctgtaggttgtaggcaccactgttatcctctttgggtggaaaccgagggtcagagcaggttctgagctgcattcctaagctcttcccaggctgctctgtgtaatcagggcaattaatgttctcttaagagccttttggggcgttggagacctgcctgagccctcacagtgcctgctgtagtggcctccacagcttaatcctgggcctggcttagaaaggtctggagggctctgggtactgcaccccaacactgcactcttgtttcccttatgctgaccacaggcagggactcggtagccccaggcttcagggccccaccactcatttgttcagcgaaaatataaggagtttctagtctcttggtctagggttagtgctatggaggcgagctcagtccagcaactctccctcactccgggctcaccagcagatggacttgtggccagctctgcccttctctcggtgcccagttccctgtttctctcagactacccactgatgtcatattgtagttgtaggatcccccggggggtgtgggggacaaccacggaggccattaatgtcaaggtgtctttgcccagatttacagactggagatggaggagaaccagctaaagagcgaaatgcaagacgccaaggaccagaacgagctgttagaattcagagtgctagaactcgaagtaagagactctatctgttgtaagctctcaaacggagcagacattctctttgagcccaaactgaaattcatgtaaagctccctgccgttcccaagcatgtgtgaagggacgtgttaccgtttctctccttccttcctccgttcttttcttcttcctctttttttttttttttttttaaaaacaaaaaacaaatctgtatgttcgggataacttcactgccttaacgtgtcctggggaggatgcttgcgacgtctgtggacctgtaccagagcaatctatttattgcctaccgcttgttttgcacttaataaaataagttgtttttgcaatattttgccttttttatttgtgtttcatttccataactactatcctgcatgcagccgctgggtgtgccttccgcaacccgacagcagcactgttgcaatggataacacacctttgatcttgcatgcagcaggcctcttctgagatagcagggtctgccccagctggctctcttgatctctgctgtgtttaacagcagtgtgggcccattttctgcctgccaaagcaaatgcgaggtaagtggaggcaggcaggaggatgtatttacacaaggtgttaaaccggctactttgctcaaacccttctggccagtaaatacaaacctgggcactgcaggcgtttggacttaaattatatacgattcaaaccgcaactgaaaactcccagacactgcacgcgtagaaaccttgtccttctgggaactccacagggcagggagtaggactctgaggaaacacttgaggaatttgttgcttccagtcagaatcgtgcgtcaggtgtgttacggtattgctcggctctcacggcccctcatcctcccattctgcttctgtttaagtcatgagcatcccaaacatctctgcacttggggtgagcctccacagggctctgtgacactcactgtgctgcttccccagctgacaccgttgttgcatgtatgacttctctccatccacatgggcgccttctctcatctgtggcttctctggcttccttttctttccttctgtggcccaaaagccttgtcctcctggcaaggacgggccaggtggctttccacttccgttgtcactgtgtctcagttctaccctttattcttccatctgaagtgagaagtcacgaggtcatgcttagtaccccacggctgtgagaatgccttccacaagtccttcgctaggacccctttcactgggagctccagataaccacatgctttgccccagcttcccaacggccttcggagccactgggaagcaggtttatgactttgttcatataaaccacgggctgctccgacaccccttttctgtgaaaagcccattgattgagtacctctggtggcaggtgtgtgggggaagtacgtggttgtctccgtcttgtctcttagaacagtgcaaagtgaggtgaaccagctggaggcttcctgaaagcccactgtgaacagcacccagccctcccctcgagcctcactcagtgtgttaaggcatgctttccgggttcatcacttctcttggtatgattatagaggtgtcctaggtctgtaattgccgcacaccccctcccccagagcagcttgacctgatgtagaatttgagagggtgccaacccgtcataactcatctgccagtgtcatggggcttaaagccagctccatgtagaaaatgcacaggggaccagggtgctgttctgccaacatgctgtaattcctctaagcaaagaggttcccttgggcctcccataaagtgctcataaggtgtatggctgataaatgtctcttttgggacatctggccataaatctgaggtgtgggtgggggcgtgaagagagtgatcacaagtcttgttagtatgcaccagagaaacaaaagcaaatttaaaaaacgccaagctgagtcacctattatcatggaaagcaaggagagtcagaagtgggcccagtcctgctactcactagcaggggacctcaggctcagccatcccaagcctccgtgggtatgtgccttgtgaggtagcctggacatcccttgtgataaccaaagtaccctgcctagaatatcccccgtggtggctggcttctgttctctgttgaatctgatacactgtattgattaagcctcctcctctgtgacttctggggtttggattgcaacaggcagacctgtgaggcccaatcgtctgtttctccctagcggtaggagagatgtgaagcttccaaagaggcaggaggacaccacgtgtctcatgccaggactgtgtggtccagatgtgtgccatgtagctcctcctttgctgataacttgggaagatggcaagaggtgaatagcagtcgagttctgtctttaaaccacgtcttttccccaggagagagagcggaggtcgccagcctttaacctccaaatcaccaccttccccgagaacaacagcagcgccctccagctgttctgtcaccaggaaggagtaaaggtagcatgcttggggggcggggtatgtcacatggacctgccactcaggggcgggctgagtacctggcgcggtggtaaagggggattgttaggtcagggacagagccagtactgctgtgttgaaagacagagagctaggtgaaaggatcatgcagggtttacccttctgcccagctacaggaaggctctaaacccaacctcgcaacgggctgtctcttatttgcgcagtgcccagcccataaccagggctttgctgatggtgactatggttggccacaggcctggtgccccaccagaccccacaggcagagtcctcagatgcccatgagcttagaaagcagggttgtactagagtgaatctcagtatacgaaccatagctacaccctccccacctgcctgcgcagagccagaggctgggccccaccgtggcttcagagcagaaggaggcgtgtgatccatggcactagagtaggtgtgggttgtatgtgcagctcacacgagaatgaacattggacatcttttccagggtgtgaatatctctgaacttatgaagaacttagatattcttggcgataatggggtaactatgagcggtcggttcccggttccgtgtccttgttttgattgtgtggctttgttttttgtttttaatttttttttctctgatttaagagatctgagaagtacaagggaaggcttttgtatggccgtgtccttgtgtgggtggtggggtctgtatttgtcagagtggggttctgagctgaggacagccttaccaatctgtgagtgaacaggggaccaacaaaactaaagactaagggacatacagacgcaaggtcccgtactcaagattgccaaagtcaaaaggtgatgtctttgccttctgaaaagactgtctttaatgaggcactatttccccaagtgttggttccactttgtgacctatctccacctagagggactggcgccatgtccctcagatggctgacctcggctggttgttgattgggggctgattgtcgtcggcacccccccccccaaagggcttggcactgactgtcttccgtgtccttggaacccagtgtcaacgcccttgcccctttttgtgttgtagaatttgaggaatgaagagcaggttgcagtaatccaagcgggaactgtgcttgccctctgtgaaaaggtagacctggcagtgtccttgtgctcacatcttgtcccagcacccggcaccatagcagaaactgtccattagtgtgtcgctttatttgggagcatgtgtgtgggtcagtctgcgtctgcatgtatacatgcatgcctttgcgtgttcaagatggagcaccacacacgctcactgcagaaagccttgatgctcaggaggaaatgcacaccaccctttgcaaggaaacaatctgtgatgtctgctttatttgcacctattggctcccatgcgcattctctttcggagtagttaacatgctgtgtgtccctcctgcttgctaagctatctggagtggctcatagatatgtattcaaatggcatccatgccattccatcacgggtacccacagagaacctcatcacctttcagtgagtcagcatccggagagtgcccactcttccctaatttaccagtgtgccctgagggacaacttcataatacatgtatgtatgcactggagagcccacccatgcattctggaacaggaatcccgggcagatagtaagaccacttgtcagggtttgggtagggcctggagccataacctgaatggtctatttccacatataatgtgtcttttactaggaataaaaacatgggcagttggtagacactacaccctgtgaggtcatagttgcactgtgtttgagtgggtagtcagcatggtgagatttccagtggcctcagcagtttcttcttccttgtgaagtgtaattatgtttctttggaaggttttctattcattcattttcctgcccatccatgtatccatccatccatccatccatccatccatccatccatcccataagcgtttgttgtaactgttctttctgtgtatgctttgtgtattaaagatgctaaatttcgactgttttttttttttaacacatcctggctttcgtgcctcctacagtgacctagaatattgagatgcacacagcttttagtagagtctttcctgcagatcttttcctttcacacagtcagactctgaaatgcaaccttgggatgatttagattggattcctgccacagtcctcagtagggcacttacaatacagttttctcccatagggacctgttcatcctttcccagccttcagccaaggaaaggacacaaaacactgacgtgagacactgtgatagtgctttgtcccaggtcacatggttgggaagggtggtggctgggtggcactctgagctttctgtttctgccccttatctggccaagtttgttttctccagtggacagttgggtcagtgagtcacacttggctggttggaggccatgagaagcgagtgtctaccacagtgctaggcagattcagtatatgactgctgtcattagcaaaatcaaatgtggtgttccagccctttacaacagaggctatatagaattacctaagtgctgactaaagatacctatatcagtatagtctgcattcatgtagcctgtcagtgttcagttcccagcaagtctctggagagtgaggaagaggccaggtttgcaagctcccttgtttccaaggagacctctcctagtttgtgtcttgggtccactacttgctgttcaggatctgatggacagagtagggccagtctatgacttggggtgtctggttcacagtgggctaggatagtggacattggtaggtgctgtctctccagcccctggggtgtcccccagggcagggatgtcatggtgacaggtggagacctcactcagaacaggtttcaggccgtgcaggaccacacctgtgccagcagcaatgctaagtccagtactgtagaaccccaggcccctcaacctcttgcaatctcttacagatgaagaaaggaggcctgtctggcatcagctagtctctgctttgccacaccttgcccacctctggcttgtactctacccacctttgccagcttcctgccagctgacacccatacgcttctgggcaccatcgccccacagcaccggcctgcctggcatttcactctgtgtcctaaatactagagggagagcctgactgttgggctgccagcccctcagtgccccatgagagcaggagagagcagggggcccatggctgatacctgtgggcagaactctggccgtcatctaggttctcctcagacttggctctgccagacgccgcttcagccgtgtgtctgtgaactaaagtgaagccggtgtggatgctgctgcttatcctctcattgcgtggggaaaatgttcacgagtaggggtgggagcatattgggagctgggtcatgggacccctgaggatgctagcccggtagccaagatagtcttttctagcttggagttggaggttccctgagatgtggacatcatagtgctaaggcagggacagtcaagaacaaaaagagacaagtgaccatagagacacacggtgccagcagtatggatgccagagaacttggttaggagccctagaaacctctctccacccaacacaccccacttaagaacaaaaactgtcatttggcacaccaatgagccccagcccagctctctcttagcagcactaaggacatttcttggtatttagacagagtgcatcccagtctggtcaggtggtccgatatataatggtctcacatcagtcagcaccctgcttcttgtcccttgtgtgtgcctttctcctgtcctctcagaagttttctcaggctctgggcggcaggaacgacccatcagatttcctctggttaactgagcacaaggccagcagctataccaagcttaaccttagcccaggtatgagcctgcacaaagaggctcaaatttaaaatgtgaagggtctgtggctcatttgtggttcccagtcagacatgcctcttttccataaagttcaaaatcctttgagaagtaggcacagacctcaggaagatgaaaaacacttcaaaaaaaaaatcaaaacaaaaccaaaaagcccactatgttctgttctgtttgtaagtaggggatgggggggtcaaaggatgagacctatttaggccttcagccaaagtgaaactttcagagctgtccctgagtcaatgtaggggaagagagtatccagttatagaggggtttcaggctcttcacctgaagatccttggcatgggattcagagagttgacgcgtttgaattgcatctgcctagacgacacccagtttctggagcatccccagtggccaggttctcctgcttcctgtccagccagatctcttccctcctggggtgggggcagtctccccaggagagtatgagatcagtggacagaaaccccagtcagcaacccagaaccgagctttctctttgtgtcttgtcactgtccttggtcctgaaaaaggtatgtgtggtttttaagactggaaagtcctgctcccctttgaaaattaatctcaagctaacatcaaactttgaaaagcacagtgctcagggttggaagatggtttagcagttaagagcactgatggttctttgagaggactcaggttcaaatcccagcacgcccatggtatcttacagctgtttataactccaagatctgactgacagatgcatgcaggcaaaacaacaaagcacgtagaaataaacaaacattttaaagtactataaaaaagcacagtgttctaaactcctcatcagaaacattcacccttttcacaagaagctattacacaagctgtgtgaggaggggctagctctacacacgtctactgcttgtccctggggctgctcagggccaagctgaccttgatgttgtgggaggaatctctgatcatgtcttttatacctctccaacctctgtggtgtccacctatatccatgctgcgcctcctccactccacagagatgtctttgtcaccactgtgtggttgactctgccctgaaagaaagccaacgaagacagatgtgctcccaccatgggcgcctggagaaatctaaatgggtaatagtgtcctcacctgagcaccaggaaaagatgaccgtgtggcctcaagaagcagtagaggcttcttaggggagaaggtagagctagcttgagagtggtgatctgggtagatgatagcttgacaaagacctggggctgatgctgaggtctgagcttccgatgtctgaggagcatgtacacaggccctgaggtgaaatatggctcattctgtctgaggagccaagtgcattttcagacagctaagatacaggaggcttttttttttttttaatgggggttagtgacaagtagggaacgtggaatcagtgcctcactgtgcagccctggctggtctagaactcaaaaggatctgtctgcctggccttccgagtgctgggattaaaggtctgtgccaccactcctggccaagcatgggttttgtggtggcagaagagcctattgagtgaccacagtgatcttcaggaggacaaggctgtgttggtcttgtccctgttgttaggagcagaggatgtgtggtgagctctggatggggtcagaaaatatccataaggatgtgcagcgaggaagggtctgggggccctggtagggtcaggcatgagctaggtgttgggtggggctctgatatggggagtgaccatggggacagagtgtggtaggtctgaaaaatgggaagagagcataaaatacaacaaagaatgtctgtactgagtgagacgattaagggctgagatagagtgaagggcagaggtctggttctagggcaacaagagttcgtggtgttaagtgggacctcagagatgtagccagaggaggaatggaccagtgtcttcagagaaactatgggatgcctcatagtctggaaggagtcttggggtcaccaggccagactataggtcttcacagttagaaggccaaagtcaattcatactcagtgtcaagtctaaatactcctgggtgcctttgacacccacacccatccccaaagtttgcctagtatagggacacgctcccaacatctggccaggcataagagggatgtactgcagccatcaagtgtgcacctcatatggtcactggcatgtctgagggtcctcctgtctcttgcccactttcatgcccatgtgtccccaccccacatgcatgtatcctcctcctttctgcatcttgatctcatagcacaccttggaactatcacgggagtggcttcccagtcctgcaggctgggtactagattcccagtccatagctgtttgactggacacaagacttaatgcagccattacatcttcacctgtaagatggtaggactgccgcctacctctgggataggcacaagaggggtcacatggatgccacacaggcttcccagttcctgtccacttatgaactagatccacacttccagacacccctttgaacacaggcctgatagtgctcacacagccatagccatgaacacgcacagcggtgtgagtgcatcgttcctcatcccgtgcaactgtctgtatgtgtcttgaggctcagcctcccggtggccctgctcacttgcctatgtcctcctgtcctgctgttttctagtggctgaagcagatagaggggacagaggcagccctcacgcagaagatgatggacctggagaaggagaaggtaaagattccagcgcctgcagcagaggcagaatttggctttgcagaaggctcagcattatcatagcatagcgttcagttcttaaggctcctttgagccatctcctttctcttcctttcccagtcacccagttttcatctgaacacttatttttgaccctgtgccccatcttggactcccaggccctggggtgacatgagtgcatcttgagaacattaaagatgtagtgtgacacatgggcccttgtctgagggtctatgcagatgtatatacagtggagatttttcatgatagcttggaaacctggagttggtcttccttggttgtggactgggtgctttaatgcaagcttggtggattatggttgtgaggggtgttatgctcctgggatgtcctatttggggtggaggggacagttgtcttcagctcagagaggcaagagaagctattccagaagacctggctccaaagccatccaagaccagtttgtattccaagttcaattgagaactcattgaagggctggagagatgactcaatgttaaaggctaggctcacaaccaaaaatataagagaatacattgaagaaggggactgtcacatggatccaaaccagcatgaagtgccagagagaggccctggagaggccttaggaacttgggtttctagttatccctgacatcaatggcaccatcggtgaagcactaatcctctttggccttctttttcctcacctataaaatacaggggctgcaacatgagttctggcccttgggcctcatgggtatagaatgggcatgtagtctgctcagatgaggcctgtgtagcaggaaccagacagcttcagggagtgtttaacagtgagattcatggggcagggggtgcacagcctgggcaatggatgggctgcacctgggaactattgagacaatcttcagaggctccaggccacaacacagggactggggactttgggaatatggactgaggagcaggctgcatatgatgttccttccttgttaccagatagccaagaggagggggagccagaatgatggtacccctgatcagggttctcatggatagtctgggtgcccagggcagtgagggcttttcagggagttcacacagggcagtcaacagtcaggaccttcctgctcccccagcactgagtctctagggagtaggtgcagagccttcctgctgttgacttgttccggccaatcctaatggcggcctctcttttctaggaccagttcagcaggcagaaaggctacctggagcaggagctggactacaggaaagaagccctcgaccaggcctacctggtaggaccggaagtgggtttgacactttggctttcttctctcagcctttgaggctgctgcttcctgcagggagcacaccaggttccctgtgcacccgtgcctagaatgaccagcaagtgttccaaatgagctgtgggcttttttaaaaaacacttttttatttatattcttttttggttatattcttttatcatttggactacagtttccctcccttccctcagactctccccctacctcccttctccccaagatccacacaccttctgcctccctcagaaaggaaccgacctcccgggacatcaccctaacatagcataacaagctacaataacaccatcacatcaaggccggtcaaggcaaccctgtaggaggaaaagggtcctacaaactaggcaaaagaggacagcccttgctcccactgttaggatttccactagaacatcaagctattcagccatgacatacatgcagaggacctagtgctgacctacacaggctcccagatccctgtgagcccctaagagtcccagctagttgcttctgtgggccgtgttcttgtgggtgttgctgacccctctggctcctccaatccttccccccctcctccgcaggactccccgagctctgcctaatgtttggctgtgggaccctgcatctcctcccatcagctgctggatgaaatctctctggtctctttgatgacaattctgccagttttctgtcctaccacactcttcaggcaggacaaactgtaggtcaaaggttttgtggctgggttggtgtcccaattcctccacttgagaccttgtctgattatagatgatgaaccgtgtttttcgcaaagtttatgatcttgattttttttctttacccatactaaatgagcagttgtttgagctgaatgagaaaaggcttttgtatattatatgtttgtttcttcataaatgtttatttatccttaaaattccaaagaggctggtgatgtagatttgccagtagagtgcttgcttagcatgcattatagccagttcaattcctgggcatggtggcacctacctgaaatcccagcacacgggattagaatttcactatcatcctccactatgcagtgaattccagacctgtctcaaaaaaatcccaaagcaggttttcattattattattattattattattattactaatatgaatactattatatctttttacagtccagttgttatcctcctcctggtctgccctctgactgttcctcatcccattcctcctcccccatctccaagaggatgtccccacctccatcctatcagaccttcccactccctggggcctcaagtctcttgaaggttaggtgcattttctctcactgaggctagaccaggcagtcctctgctgtttatgtgttgggggcctcatatcagctagagtatgctgcctggtttggttgttggctcagtgtctgagagatctccggggtccaggttagttgagactgctggtcttcctatggggggtcgccctcctcagcttcttccagcttttccctagttcaaccccaggggtctctgctttctgtccattggttgggtgtaagtatctgcatctgactctttcaggtgctgcaggttttcttgtagataggaacagagatgatcctaaagaacaaagaggtgaggaagtgagctgtggccagatgtgttcaagcaaatggggagaggtttaaagccctgtgaaaccctgtggggttctccaaagagtctgggtttccctcaaagtcacaaatccctcgcaccaagagccattctcccttgtgggtgagggtctaagttgtgggtgggacatttccaagatgtccccatgatggagggagagtcagtgccactctgtggaggacggtcaacactcatcactgagcaacatctctcctgtcacttttggttccttatcctgtgacgtggccgacaacagcatggggggggggatatgaatgaatgagaatgctctcatctctgtccctctacctcatccagtcttggtccttgtaaatgcccacgaagaacacacccccactgaccagagctgcctctgaagcctgtttagcagccctgaaggacagccctcagagaagcttcgggaacccagttgtccccaaggggaggtacattagatggaaagctgagggccctgatcctaaggtcctcccaggacagtgtgctaaaggacagctgcagtgctgagagaggtggggaccagcattgcaaagtgctgtggttcactggggcctctcacaggacagctatttggaaaaggtgatccccaatcataggactgtgcacaggcaggtttaggaccttgagcatgttggcttttagaacacatccttaccttaatgatcctggtccctatagaagttatagctatcactgaaacacactaaacctcaagtgcacagcatggacccagatggctatctgtcttgtgaggttctaaacagttctcgggaggcatcagattcacttagagcttggtctatggacctctcacctcctgcttccaggctggttaagggaaggtgttgggtgcatggctgtcttcctttgtcatggtgtggactgaggagtggaaactggcgtttcccacaagcttggttgctctggtacagtgacagacaggtatatcaaatggaatagagttgaagatccagaaatgaacccacacacctatggtcacttggtctttgacaagggagctaaaaccatccagtggaaaaaagatagtgttttcaacaaatggtgctggcacaactggcagttatcatgtagaagaatgcaaattgatccattcttatctccttgtacaaagctcgagtctaagtggatcaaagacctccacataaaaccagagacactgaaatttatagaggagaaagtgggtaaaagcctcgaagatatgggcacagaggaaaagttcctgaacagaacagcaacgacttgtgttttaagatcaagagttgacaaatgggacctcataaaattgaaaagcttctgtaaggcaaaggatactgtcaataagacaaaaaggccaccaacagattgggaaaggatctttagcaatcctaaatcagataggggactaatatccaatatatataaagaactcaagaagatggactccagaaaatcaaataaccccattaaaaaatgaggtacagagctaaacaaagaattttcaactgaggaatactgaagggctgagaagcacttgaaaaagtgttcaacaaccttaatcatcagggaaatgcaaatcaaacaaccctgagattccacctcacaccagtcagaatggctaagatcaaaaattcaggtgacagcagatgctggcaagggtgtggagaaagaggaacacttctccattgctggtaggattgcaagcttgtacaaccactctggaaatcagtctggtgattcctcagaaaatttgacatagtgctacctgaagatccagcaatacctctcctgggcatatacccagaagatgttccaactggtaataagggcacatgctccactgtgttcatagcagccttatttataatagccagacactggaaagaacccagatgtccctcaacagaggaatggatacaaaaaatgtggtacatttacacaatggagtactattcagctattaaaaacaatgaatttatgaaattcttgggcaaatggatgtatctggagtatatcatcctgagtgaggtaacccaatcacaaaagaagtcacttgatatgcactcactgataagtggatattagcccagaaacttagaatacccaagatacaattttcaaaacacaagaaaatcaagaagaaggaaggccaaagtatgtatacttcattcctccttagaatagggaacaaaatacccatggaaggagttacagagacaaagcttggagccaagacaaaaggatggaccatccagagactaccctacccagggatccatcccataatcagccatgaaacgcagacactattgcacataccagcaagattttgctgaaaggaccctgatatagctgtctcatgtgagactatgccagtgcctggcaaatacagaagtggatgctcacagtcatctacaggatggaacacagggtccccaatggaggagctagagaaaatacccaaggagctgaaggggtctgcaaccctataggtggaacaacaatatgaattaatcagtacccccagagcttgtgtctctagctgcatatgtagcagaagatggcctagttggccatcattgggaagaaaggccccttggtcttgcaaactttttgtttgtttgtttgcttttttgagacagggtttctctatatagccctggctgtcctggaactcactccgtagaccaggctggcctcaaactcagaaatctgcctgcctctgcctcccaaatgctgggattaaaggcatgtgccaccaccgcccagctttttttggggggtgggtgggtgggtcttgcaaactttatatgccccagtacaggggaatgccagggccaagaagtttgagtgggtgggtaggggagcagggcagacaggggagggtataggggactttcgagataacatttgaaatgtaaatgaagaaaatatctaaaaacaaaacaaaacaaaaacaaaaaaagaagctttgttgctgaatggagaggagtgagctaggatgtttgatggtgagtattgaccatcctacacgtaagctcctgtgacacttggagcccaggcagaggccacatggaatcccactgttctgccttctgttttcccatggccaaggtgactctgggagaaggtggtcgtgtctgtagccaaatcaatggtaacccaaaagggctatctaggaagtcagaacaatggtgcagatgtgagaatcgcaaaaccttccctcggttgctctgtctcatattagggtggtgtcctagttagggttttactgctgtgaacagacaccatgaccaaggcaactcttataaaaacaatatttaattggagccagcttacaggttcagaggttcagttcattatcatcaaggcaggaacatggtagcatccaggcaggcctagtgcaggagaagctgagagatctacatcttcatctgacagatgctagcagaatactggcttccaggcagccaggactagggtcttaaagcccacacccatagtgacacacctactccaataaggccacacttactccaacagggccacaccttctaatagtgccactccctgggctgaggatatacaaaccatcacaggtgggttccatcacatggttgtgatatttcttggcttggggtgagggactttgtggcagcaggagagagacagttttcccccttgcctctggacaccatggcaaggtaactgttgagcatccagcagagagtctgatgtaacttcactaagaattcaaaccctgaatggcgggactcctacagccagctccactgtctcctatagcattgcccacaaaggtccccttactatgtgcaggatcagggatggggtggtgggtaggacattctccatatttgcttccagaaaagcttccttctccacacagctggtaaataaatcatacaactgacaaatagtgccccactggcttcattagaatagagggtgagagtaagttagaagccgaagagaagataaattccagttaaatggatttgtttcagggagatgtgtttcttcttgtccttgtctcctactcagaccaaggatatttgtctctgtcaagaacagaacactcaatgaggtgtgccttggccagagagacctccacacgctctgctggaccctgcatgctgaccttccctccctagcgtgacctctagcatcacagaggcaatggctgtctgcctttctataacctcaactgtctctggtttgggccatgcagaaaatccaggacctggaggccaccttgtacaatgcactgcagcaggagccagggcggagggccagtgaggcactgagtgccagccagcgtgaggacctccaggcagcagtagagaaggtgcgcagacagctgctgcgtcagagccgggagtttgacagccagatcctgcgggagcgaatggagctgctacagcaagcccagcaggtactagcagtggcccctacagtctcattcccccactcgtactttcaatatatcctgggtccctgatgacctgctggcacttgatggacatcaggtaacccaggatgttgggtggagagtgacaggtaggagaagttctgctgacacggcatcttttcttatggctgcctgtcacagagtagaaagcattccctcgttggtggctggggagacacaaggcacttgggtgttgtaaatggtaaacttgtattctccattgactgtaacatatccacaaaacaaaggtgattctcccacctccctccaacgctccctatatggcagcctgatgtacagggaccacactgcctcagcaactcttagctgttaggtttgggatggccaagaatttgagaatcagcctaagagcctgacttgctacttcttggaggacctaaccatctgtgaggttcatacgatgctgagcagagaaaagaaggttccagaaccttgatgatagctgagggaggagaagcagaagagatgagctacacagagctttgctaggatgcatgcttcatactcatcagagcctccgcccacctcgtggcatccccgtgaggtgcgtgaatgcacacacatcatggctgtcaccagcactacctgtctctgtccttctccttccctgaagcccccaggtccttgctgcctggatgttggactctgagtgattgaggcaattcatcttcttgtcctgctgggagcctaggtgccccagctcaggcctcatctcatgagtgtacaaggtctacactggacctgagcaggtcatggacttcacaagcaaatgaagtctatccctctgtaacaagtcagaagagagagttcctctagggggactgcctgtcctctgggtcggtccttcagggattccattctggaccactataaaagacataggccaggtttttgtaacgcatgactcgatgtgtttcagaaaatccgggagatggagggcaagctggagctgcagaggcgccagctgaaggagctagaggaaaaggtaggtggaccgggagtgctaagaccagatagctgccctgttcagctttaaaacccaggcttcctgttccccagttcatccgaggaatccaaggcctccacaggcagatgctggggccacagggtcaggaatccatttcagtgtctgggtaagggttggccatttcagcgtctgggtgagggttggttcaaatcccttcagaaaggctgaaaaggtgagccatattaaaaagatgtagcccagtcatcaagatccaagtcagtgagagaccctgtcttaaaaacaagataaacaactgctgaggaatggaacggagcgttctctagttccccatccgtacccatacacatgaatacacctacctacatacacgtgtacctacatacacaaccatgcacacacagacacatatacatgtcaacacaaaataaataaataaataaataaataaataaataaataaatgatgaatgaatagattatgccttacatgcaggaaaaaataaaaatagtaagagtctggggggaatagtcaaatggtagaacacttgcttagcataaacagaaggccctgagctcaaaacattagcatacaagctgggtgtggtgggacatgctttcagtcacagaacttaggaggctgaagtaggggaatcatgagttcaaagcccccatctcaggaaaccaacctccctcgaaattaattcatatatatttatataaattagcagagtgctacccaccttcactgagatgtatacttaacacatcagtcctagtaaacaaaccctttcaataacgtagattgtatttctaatttttgtttgtctatattgtagtcccactttcaagaatacacccagtacagtgcctggcataggcagtgtgagaaagagtgaacgaatgaacgaacgaatgaacgaacgaacgaacgaatgaatgaacgaatgaatagcaatccctgaatcttagttcttttcactgggacaaaaggacatagtaataatgaagtcatgtgtatttgtagttatttttgcattaaagatcttttttgcttctttttttgacctctgtttgtgaatgtatgcatgtacgtgttttagtgaggtctatatttgtatgtatgtgtgtgtgagatgcatgtatgtatgtatgcatgtatgtatgtatgtgtgtatgtgaggtataagtatgtttgtatgtatgcgtgtgagaggtagaagtatgtatgtatgtgaggtgtaagtatgtatacagatatatatgtatatgtatgtattatgtatgcatgtgtgtgagaggtgtaagtatgtatgtatgtatgtatgtatgtatgtatgtgtgaggtatatgtatgtatgcatgcatgtatgtgaggtgtaagtatgtatgtatgtgtgtgggcacatattgagatgtatgtgttgatgagagtgcctgtgtgcacacacagaagccagaagaaggtgtctgatatccttctctaccactctccaacttttcctaggaccccttgctgaacctggagcttgagatttttccactagcctgcctccaacaggccccagcattccttctgactgccatcccatcagtgctgggataacaggcatgtgtgggatgagagacacagggcagggagcacataccatgactgaagtaagcaagaccatgctatggtgccagtccaggcctggcacttaccagctggccagatgtgacgatagcggatgtgtctaatgcatgcttggtgaagctagaaggcaaactcagcatcacagactaagcagaattcctgggaggaaacagtacacacgacaggagaggagcacacagatgcctcccaagttctcgctcactcccacgggcttcacactgtgcacaacagtagatacaccaatagctgtgcctattggcctggagagatggctcagtggcttgggcagctcaccatcacctgtaaccacagctccatgggtatctatctgacgtcctcttctggcttctatgggtattgcactattgtgcacatacacacatataccatataattaaacaataaagtctctaacaacaacaacaacaaaaacaacaattaccacttccagacccagtttaactttgggatatagtagagtgagctgttttagaccagcccttttgctaagaattgaaaaacataaaaatcaatcctctcaaggctgggcatggttgtggtgcacacctgtaatcccagtacttaggaggcaaagttgagaggtcttacaagttcaagatcagactggaacgcatccacaggagtgaaaaatggtaggccaatatccagacagggaggatcccagagacaaacacttgcactcatcccagaagagaaagccagggttatgtggatgctggtcgccaccctgtgctgctgacctagcagactgcaaagctagttgaggaccacacaggcaaggtgactgtactgtgattgtcaccacttcctgtgacaacacctgctaactgtgcgtcccttgagggcagggtgaaatttcactcatgtcttcctctgaggcaaagagtagagtggtcatagacaagtccagggagaagtcatagttgcatagcttatgtcaaagagcaaggcggtaaggtcgagcttacatctgtggggtggtgaggacatccgtgggcagaagcacaggccttctgacccagcctgattttcagggtaaggctagtgtgcctgagaagactctgtctgaatcctaaatgaggatatgggaaagcccagaaggaaagacaaaggccacttctgggctgaaacatgccaggccagcttgtgggaaaggagcttgactctctagggacagcaggaacacgttgctagaagtcactggacagcagagtttgaggctcttcatcagttgggcagacttcctggtggttgtcagatactaaatataggtgatggggagagagaaagagaaaaatgctccttgaggctccttgagggacagatgtattctccttgagacgttaaattcagacagggcaatcactagtctcgcctgtatagtttcaggcgcatctctgcctgtgtctgcagggccaaaggtccatgtctaggtagtaactaccttggttttcccatcagttcccttctggggaaccctttgagtggctgtgctagatcccagagttccctctgctaaccttctaggactgttgggaagtcctaagggaatgtcaggttgatccagctgagaatactatggctccgtggctgggttcaggatagcccgagatcctggggctgtaagtggagggtttcttactgctctgagaatgagactgtttgcctccctgggtggcagcaaggactccattagtgagggaggtgggtgggggtggggatgggggaatgaactctgcctgccattccatccataggcaccttgagagtcatagccagatgtgacaactgtacaaacgtggccacaagggctgtcacttattaagatgttaaaaatggggtggggtggggtgggggttgggaagatgcctcagtcagtaaagggcttgctttgcagacattcccggtgctggatggattcccacaattcacaccaaggacagctgggtgtggtgggacacagttagagacccagtgctagggaagtggagacaggcagtttggggactcactggtcagacagtgtggcataactggtgagttccaggtcggtgagataccccgtcacaaaaatccaaagaggacagtgcctagggaatgacatttgagcttgtcctctgccctacactcatgcatgcacacctgcaaccgtgagccaaccgacacacaacacatgcactgtacacatatagtaatatcagaaaccaggctggctgggtgggtatatgctatgctgccatggggaagcaccggttgtcacctggattgtttctctggtctctcagactttctcagagctgatttgtggatggctctgtctccatcttcccagaagggcatgcccaggccaaacacacagcaggagaggctgacctgactctggtggattactagttggctatatgacaggccttactgtcacatctaggtcctcccagtcactccgtgcaagtgatcgtgggaaacactgtggcttgtcatctttctctccttctgtggccattcttattcacaatccactggatggtcactaaaccctcctcccactgagcctcagtttccccatgtagaacatgaactattgtgggattgcagtgacctcttaagcttttgatcctagagactggatggaagaaagtggtaatgttatttggattttcacttttctctacaaacaacttaggaaactatgatcttgtttggtggggatttttttttttaaatcccagatggtggtcatatttgtttcctctagttactactgattctgtttaaacagggcaagtcacaagtagattaagaaaaaaatattcttttgaactaactgatctgtcttttctggttttgtaagggtatttttttcccagcagcgtttctctaaagacgactagcaaaaggcacatgatgttttaaatattaacaaaactctttccaggggcagtgtagggaaggatcacttgtctgcaggttggcctggctgcctcccttgttctgcccactacaacatatactggagaagcacagagtgcccttgggcaggcccttcccttctgctgccctgcgcagccttatcttcatctcccaaagtcactgcacatggcataggtctcacctggcagcagggattgatgggatacctgataaaagtatagggacaatccactgagcacataaggctggagggagcaacggcacctcctgttggcagccctccgcgcctctctctgctgccccctagtgttctagttttgtaagatgctgtcagtgaattccataccacatctcacattcttttcttttttttttcttttcttttttcttttcttcccttttcttttatttcctttccttttcttttctttttttctttttccttctttccctttctcttcttgttttcttttggtcttatgttatagtttttgttcctttttttgtttttctcactagcattcattctgtggccttgacgactcccatgcgccgccgagaactcgggtgtgtatcctttcctttctactggctgatgcagagccgattgagagaggaggttgactcccctccggctgtgctgctccttgggagatgaggagccttgagagcaaccttgttttggattctcccacttcatctcctcaggggctgtgtggccctgggtccttggggtcctgccatagaggcacatggtgaggattactgagaaagagaggccccatggcatttcatccacagagtttatgtcccattcccaaagctatctccagtctggtgtagttcctgctttgtgcaaagtgaccttcaagtgaccttccagggcaaggagcagcaggttgacaagccagtggctcatgaagccagatccctaatgtgattgcacaatgtccagaaaccaacagtctttggctcctcacctctggatctcaacctgcatgcccagttatgatgcccgactatattcagagacctgaagactgaaggcattccaggatctggccctgccttggctgttgattccttgtttccaagcacccagctttcagcctgagtccctgcctttccatactctcccagtccccttaatagggctgcccataatagggctggtatctgccaggacctctgaattttggagtcttgacccagaatctaacctaggctgaggatccttgaactccagggtacccttgaggcctactagatccctagagggaccactcaatgtccttagagatgtccctgactctaacactagctcacaagggcttaagttaggtaccttctatgtcccattgcctgggacatatccaggtacatgtttggtcatgatatagagagaatgaagggttatcccgagctctgggagacagttcacaccaagctccattgatggagtcctggggcttgggatatacaaatcctgctcccccttttttttttctgggttgtggagaaggttctctgggcaactgtcaagagagatcaggatggtgtgggcttgaagatataccaaggcactcttcttaacctttgattttttttttcacttcaaattatctcttaatcttacaggctagacaaagagcttttggaatcacctgagtccccgtggtgccccatcctcactgaaaccaaaatccaacagcaacaaagcttttcaaagtccagagcctgaacacagaatttacgcacatttgacagtcacttaaaggggaggcctggggacctggccagcctctgctgtggagctctgcaggacaatggcaagccttcccagtatccccactgtgacatcttcaggagccaagggcaaaggtggatctggatggcagaaatcgataagtgcaattagtggaagcccaggacatgggagctactaccttgggggataggcacaagccctgtccccgtgttgtgtgcctccctgaaggcaccgcgagtgcctagagggactcagacagcccctctgccccatgtacataaatctccatggactgagtgtgttcttccagagtctgtctgccagagcaaccaacgaaacctctgactccatgcacagctggactggcagctagtgaccagcaagagagagttggaatcgccaatgtggggaccctgtggattgtagatttctgaggaaagctgaaggctctgacacttataggtgtgacactgcataagtcccagagcatggctgtgcctaagtccagggagaagtgaggacagagaaaacagacccaagctatctgttgtaatttgtagggatatcctgtgaaggagctcaggctggtagtgcagcactcagaggctctgaggtctgaggtctgaggccaggagcaccctttaccataaagaaaactactgtagagccttcactgcccaggattcttggtagagagtagagtcatctcctcaggtgttggggcctcccagagcacagggggtaagataaagggtagtgcactctaagttcactgggaacaagatgctagaagtcgacttccagaggaaattccccaagaagtaactttggggaatctagggcaggtagggtggggaacctccaaaaggaacttgcctatgtggctatactctttcaaacttggggtggagagaatgttagccatcagattgacagtgtgaaaaaaaagataggacgctgagtctgggtgcaggagcgtgtggtgaggctcgatgagacacggaggcagcaggccagatgaagcctcttgctgtgtagttacaggaccaagctagtggcaccatgatttcctggaagcaagaagattgactggggctcagatcaggcccattgatggaaccatggagcagggaccggacattgtagggaagccagattcaaacacagagaggcgaggacagtgctctggacggaagaggggctgtccagacaggaggtcatcccgggagctatgacgtctccagcttgaagcaaacacagcagaatggctcagaagtgttgactctctgctgaaatctgagtcccccaacacctgtgacccataagcctctgcaacctaccactacccagtggcttaattaaatcccaaggaatttatctttgacaagcatctgagtcactgagtcgcaggagtgtgggcaactgtcaggaatatggaaagcgtgcttgctttctctgataggagatgcagggggtacgattcaactgacttctgtagacagtcatcccggggcatcccagagggtcaaggaaaagtccaccactctgtccccacaactatctgtctagaatccctgcaggctgtgctggagtgtggcccttgtaccttctgtaccttgtacctactgtgagggagagggcagcctccctgtctgcctggatctttcactcaacaccttatgtgacagtgacaccttaactctgcagtcagacccgcctgggcactcccagctcagtcatttccctgatgcagataaacagtgtccttgtgactctgaggaacacaactgacagatcccaggccatgcctcgtggaagagcttctgtgaccacagcaggatgggtggacctgcatcattccactctgacatcccgtcagctgctggcaggagcaaggatctgagaccctagtggaagggtcttcccaggagtattcatgttgctcggtcggggccagtgtccaccctcttctacccccaggaagccactcaggcctgagaattcagctcacacagacaggtgtgcaagcttcctgagtccttatggttatcttaaacatttctgccagagtccctgctgggacgcacagtctcagggctcttgccaccaaatgcctgtgtagtttccaggagagtagagctgtagagccaaggctccaaagccaaggctacactcttctgtagacaggaaggcaggtggaattttccttcgttcttcttctagactcactaggagaatgaagcccatagctcatcctatgaagtcttcaaacacaaggttccacctctgtaccccagtcctctaagcccgcgtggcatggtgatcttgagcagggcagagaagctgaggggtcaaggctactctgtcattgctgcagcctgtagcggctaagtggggaggcccgggctggagccaggtagctagatgagctgaggactgggagcctttagctttaaagtggagggtgcccctaaggctgaaattcctatttcctaccaggtcctcttcactttgcttggtcatggaaaagtgctcagtcaaggtcccctgcttagcacagtgtagagccccaaccccgcccatgtgctgtgcagaagccaggagtcttagctcagttctacacagagtccacccagcctgacaccctctcagttgcttcctatcctggctaggcagggactacatgctctggcctgcttcaggtccctaaccaaggtcatgctccctgaagaattacatggctgctgttttctttggattccctagccaggtgacctccaggaacctggcaatcccagtaccatgcaaatgggttgttcttttatttctcatgctttacctcagcttgttaagggattcccatcagggagcaggaaaccccaaaccagccactttggtgtctttttcctctaccaaattgtcaacaaaaaacaaaacaaaacaaaacaaaacaccaaacaaacaaagaaaaaaaacctcaaaccaaaacaaaccaaaaaacaaaccagcaaacaaataaacaaacacccccagacaaccaagagcctctgaggggtttctgcagaccccactatgtgtccagagccctactctggtagaaggtactagtctcaaggctgagcctgccctttcccctcctcatccattctcctcagggccaaggttttaagatgggtgctgcagtcatgacctgagttctttctgtggctatctctcagtcatgtctcctaagacattggtctctgtccttatagccactttcttgaggccggtctcccagggaaaactggtggccacaggcccagtcccctgcagcagctaagcagtaagtctggtcacaatgcagacagctgagggcgtgacccaggaaccgtcactatgcctatcacatccacccagtattcagcctgaggatgtgctgggctcaatgctcaagctgtgtgaacccactcatgtatcctctcacagacccagatgcctgtgctccagacagtgtctggacatcccttgatgagatactcagtaatttgtccagattcatacctgagacaggattcaaacccaaggaggaaggccccagcacctctgatctgagttgatcttcctgtccctttaaggccagtgtttcccatggcccattcacccctcgagtcccccagagatctactgttgggaactctgaagacctctctacaaaggtagaagagagagccacagacttcgctgttagagagcctgaagcctgagtgaggtgcatcccaggcaacccagaagtgggtaacagacaggatgcttggggtggggtacacatgatttccagacaagtcctactgccccgaagaccacagctgctgctttccaaggatgggtcaccccaagttcacccgctggtaagctgggtaaccctccggcttcattaagtgggtttatacaaagattacaataaatgtctatctttatggcaagaggcaattgtacaagaaaggctgggaaatggagagaaagtgaatgagcagctgtgtgcagaggtggaggagggggtgatacgg

SEQ ID NO: 955 - DNA, 3030 bp, Mus musculus
atgcgggagggggcggggccaatccgcgagccggcgcccggcgcccaccgatctgcagccgctagcgtgcggcgccggtccccgccgttcccgcatcgcacacgggttccccacgggccgagcctcctcggctacggtccaggcagcggcgacggcgacagcagcgtaggtgcgcgcggggagggggcggccggagaatgcggctccccgctgctgctcggcttgtgtcggagcgtcaagcaggtgggtacagactcgccagtgatggtgtgcacagaggacgagcggagccctgtacgactgcttagcacagccgagctggtagctgtactcgctggaaacatgtctaaaaagggccgcagcaagggggacaagcccgaggcggagacggactctgtgcagatggctaatgaagagctgcgcgccaagctgaccaacatccagattgagttccagcaggagaagagcaaggtggggaagctgcgggagcgtctgcaggaggccaagctggagcgcgagcaggagcagcgtcgccacaccgcctacatctcggaactcaaggccaagctgcacgaggagaagacgaaggaactgcaggcgctgcgcgaggcgctcatccggcagcacgagcaggaggcagcgcggaccgccaagatcaaggaaggtgagctgcagcggctgcaggccacgctgaatgtgctgcgcgatggcgccgcagacaaagtcaagactgcattgctggccgacgcgcgcgaggaggcgcgcaggacctttgatggcgagcgccagcggctgcagcaggagatcctggagctgaaggctgcgcgcaaacaggcggaagaggcactcagtaactgcatgcaggcagacaaggccaaagccgccgacctgcgcgctgcgtaccaggcgcaccaggatgaggtgcaccgcatcaagcgggagtgcgaacgtgacatccgcagactgatggacgagatcaaagggaaggagcgggtgatcctggccctggagaaggagcttggtgtgcaaaccgggcagacccagcggctgctgttacagaaggaggctctggatgagcagctggtccaggtcaaggaggcagaacgccaccacagcagcccaaagagggagcttcctcctggcattggtgacatggcggagcttatgggtggccaggatcaacatatggatgagcgagatgtgaggcgatttcaactgaaaattgctgaactgaattcagtgattcggaagctagaggacaggaacaccctgctggctgacgagaggaacgaactgctgaagcgctctcgggagacggaggtgcagctgaagccgctggtggagaagaacaaacgcatgaacaaaaagaacgaggagctgctgcacagcatccagaggatggaggaaaagctcaagagcctcacgagggagaacgtggagatgaaagaaaagctgtctgctcaggcctcgctaaagcgacacacgtccctgaatgacctcagtctgaccagggacgagcaggagatagagttcctgaggctgcaggtgctggaacagcagcatgtcatcgatgacctctctctggagagagaacgcctgctgcgctccaagaggcatcgagggaagagcctgaagccccccaagaagcatgttgtggagacattttttggatttgatgaggagtccgtggactctgaaacattgtccgagacgtcctacaacacggacaggacagaccggaccccagccacgccggaagaggacttagatgagaccacaaccagagaagaggctgacctgaggttctgccagctgaccagggagtaccaggctctgcagagggcttatgccctgcttcaggagcaggttggggggacactggatgctgaaagggaggcccggactcgggagcagcttcaggccgacctgctgaggtgccaggccaaaatcgaggacttagagaagctgctggttgagaagggacagatttacagactggagatggaggagaaccagctaaagagcgaaatgcaagacgccaaggaccagaacgagctgttagaattcagagtgctagaactcgaagagagagagcggaggtcgccagcctttaacctccaaatcaccaccttccccgagaacaacagcagcgccctccagctgttctgtcaccaggaaggagtaaagtggctgaagcagatagaggggacagaggcagccctcacgcagaagatgatggacctggagaaggagaaggaccagttcagcaggcagaaaggctacctggagcaggagctggactacaggaaagaagccctcgaccaggcctacctgaaaatccaggacctggaggccaccttgtacaatgcactgcagcaggagccagggcggagggccagtgaggcactgagtgccagccagcgtgaggacctccaggcagcagtagagaaggtgcgcagacagctgctgcgtcagagccgggagtttgacagccagatcctgcgggagcgaatggagctgctacagcaagcccagcagaaaatccgggagatggagggcaagctggagctgcagaggcgccagctgaaggagctagaggaaaaggtaggtggaccgggagtgctaagaccagatagctgccctgttcagctttaaaacccaggcttcctgttccccagttcatccgaggaatccaaggcctccacaggcagatgctggggccacagggtcaggaatccatttcagtgtctgggtaagggttggccatttcagcgtctgggtgagggttggttcaaatcccttcagaaaggctgaaaaggtgagccatattaaaaagatgtagcccagtcatcaagatccaagtcagtgagagaccctgtcttaaaaacaagataaacaactgctgaggaatggaacggagcgttctctagttccccatccgtacccatacacatgaatacacctacctacatacacgtgtacctacatacacaaccatgcacacacagacacatatacatgtcaacacaa

SEQ ID NO: 956 - protein, 880 aa, Mus musculus
MREGAGPIREPAPGAHRSAAASVRRRSPPFPHRTRVPHGPSLLGYGPGSGDGDSSVGREGAAGECGSPLLLGLCRSVKQVGTDSPVMVCTEDERSPVRLLSTAELVAVLAGNMSKKGRSKGDKPEAETDSVQMANEELRAKLTNIQIEFQQEKSKVGKLRERLQEAKLEREQEQRRHTAYISELKAKLHEEKTKELQALREALIRQHEQEAARTAKIKEGELQRLQATLNVLRDGAADKVKTALLADAREEARRTFDGERQRLQQEILKAARKQAEEALSNCMQADKAKAADLRAAYQAHQDEVHRIKRECERDIRRLMDEIKGKERVILALEKELGVQTGQTQRLLLQKEALDEQLVQVKEAERHHSSPKRELPPGIGDMAELMGGQDQHMDERDVRRFQLKIAELNSVIRKLEDRNTLLADERNELLKRSRETEVQLKPLVEKNKRMNKKNEELLHSIQRMEEKLKSLTRENVEMKEKLSAQASLKRHTSLNDLSLTRDEQEIEFLRLQVLEQQHVIDDLSLERERLLRSKRHRGKSLKPPKKHVVETFFGFDEESVDSETLSETSYNTDRTDRTPATPEEDLDETTTREEADLRFCQLTREYQALQRAYALLQEQVGGTLDAEREARTREQLQADLLRCQAKIEDLEKLLVEKGQIYRLEMEENQLKSEMQDAKDQNELLEFRVLELEERERRSPAFNLQITTFPENNSSALQLFCHQEGVKWLKQIEGTEAALTQKMMDLEKEKDQFSRQKGYLEQELDYRKEALDQAYLKIQDLEATLYNALQQEPGRRASEALSASQREDLQAAVEKVRRQLLRQSREFDSQILRERMELLQQAQQKIREMEGKLELQRRQLKELEEKVGGPGVLRPDSCPVQL

SEQ ID NO: 957 - DNA, 97081 bp, Homo sapiens
tttctgatcaagaaattgaggcacagagaggagacagaagtctcctgtctgaggtcacacagctagtaagtggcagagctaagaatccacccagtcactctggctcctgagcccgtgctctcgccctccacatccccctccctgacctccatatcacatgggctgggtgctgtcctcctagctttgcagctgacgaaacaacagttcaggggtatgaactgacgtctcccgcatcctagagccggcacttgcttgtgtgggacttgaattcaggtcagcagctgctccctctaacctctatttatatcacattatgttatttttcttcataaggcctctgccatgccttgaatctcagcaccatcttttaaagacaagaatcttttgtgatttcatgctaaatatgcaatgcagcgtctttgtagttcctttagaaaatgtatccaggcaaaaatcaaatcctaaaagaaggaaaaacccaagtaccctaacctctttcaaagatgtcctgtctcaatagattgtaaatatttgtctacgctattttattattattactatttgagacagggtctcactctgtcgcccaggctggagtgcagtggttcgatctcggctcactgcaacctctgcctcctaggttcaagcgaatctcctgcctcggccttctgaacagttgggattacaggctaatttttgtacttttagtagagacggggtttcactatcttgaccaggctggtcttgaacttctgacatcaagagatccgcccgcctcggcctcccaaagtgctaaggttacaggcgtgagccactgcatccggccctgtctatgctattttaaatgcctacacttaaatataagcctgcctacaaatgcacatatatacagcgtatattatatgcagtatatatacacattatatgtacgtatacactgtagtatgctgtatgtacgattgtataagttgctttttccatttaataggtggcaaacctcagagctggcagagtgatgcccacaggtcaaatctggtccacagatggcttttgtttgggctgaaacatatttaaacaaatttatgtgaattcatttctaatgtatacaaattggaaaatttcacataaaaatcaatgttagctttctccggaaaaatcagatctggttcctctgtttaatgctcttgaacatggctggagccgcgctgcgatcactggagtagatggcgtgtgccgagggctcactccagtgacttcctgcacgtttgctgtgtgctccctgctaggtccgggggcagcctgcacgtctgttgtgatggcgtacacttctctactgcatacccatcacgggatttagtcgtgcagttttgtagtacaaggaattccctatggctggacatttaggttgcttccaacttttgccctcctgatgcctggcaccgttcttcggaaggtgagagggaagttgaaggcaagagagtattggtctccaaacagtcacgttgttccgggcctgaacactgaggaccatttgacgcccttgctccttacgcagcccactgttgatagagtcataggaaaaatcctgggtcaagctatggacattgttggcaaatctggcagcacatgccagtgagaatgatgatgctgatgaagatgaagctgctgccattttttttttttttttttttgagacaaggtctggctctgttgcccaggctggagttcagtggtgcaatcttggctcactgcaacctctgcctcccagattcaagtgattctcctgcctcagcctcccaagtagctgagattataggtgcgcaccaccttgcctggctaatttttgtatttttagtagagacaggatttcaccatgttggccgggctggtcttgaactcctgatctcaggtgatccgcttgcctcggcctcccaaagtgctgggattacaggtgtgagcactgtgcccggcctgctgccattttttgagcattgctttgtgccaggaagtgtgccaagaaatgcccaaacctgaaggcacttagcctccagcagctctgtggagtggggactcggacagcctctgagtctccacttgggccataaaggacgcatggaaggagctgaagctggcctggggtgtgagcttcactctggtatttcagttctgctcaaaagagaacccagtatcatctctttcattattttgttgattgcataaacagcatggccaccatcactggattttaaacgaaactgaaaatcgtgggatgtgaactgatgagaagcacattccccatctctccaggtgctgcccggcagggctcacatgccactgttgtccgtgggcctccctccctgtctctgcctgggctgtttctgagtgggctgatgtgcctttgctcattcagccatcaataacttttgggtcctgaggttatttccagttttccactgccatcaacaattcaaatgatgctactcgcaacatctttaggcagattgctctttcctttcgggaattgcttccttagaataaatttccaggaagcatattactgcgcctggggtaggaatatggctgtagctttttaagtcagtacaatcaatttggatttagatatttaaaacaaagtcatgtacttactcagagagagatttttttcctaagggctcattaagtaatgaatgtttgttaaaaaaaaaaaaaaaagtgtggctagattctttaggataaactgttttctgtccacagaaaggatttgactctaccaacctagcccattcatattttctccacggagacccctgggatttccacgtaatttttggtgaagtttgcaggaagtgttacaaagacttcttggtgatgggctggaatttctgcttatcagatattatttggacttgagttgtcttgaaggagctacttttctttttgtgcctgtgttacttgaatcctcctataaaactatcaggccatgtggggctggaggcaggagacctgggttggaaagcccatggctgccaccgggtcatccaacaatcttgggcaactcacttctgctttctgaggcttactttttccatctgcaccttggaggcaaaggtcccttctgatctcaccttgcaggttgtgaattgtgactgtagagggatgtgagcagccctgttcagccgggaggcattgtggtttcttgatgagatcacacacagtgtggagaggggcaaggcaaggcttattcagactcgtgttctgaggagctggttgccttccggcattaaacaaagtgctgactgtgtcccaggagtggtttttttttgttgttgttgttgtttgtttgtttttgagacggagttttgctcttgttgtccaggctggagtgcaatggcgtgatctcggctcaccgcaacctccacctcccgggttcaagcgattctcctggctcagcctcccaagtagctgggattacagccatgcgcaaccacgcccagctaatttgtacatttagccgagaggggggtttcttcatgttgggtcaggctagtctcgaactcccaacctcaggtgatccacctgcctcggcctcccaaagtgctgggattacaggcgtgagccaccgcgcccggccccaggagtggtttttccctgcatgcctggtatattaatttcctgtggcctctataaagcatgaccacaaactgggtggtaaacagaaatttactctcgcagttctagaggtcagaagtcccaaatcacagtgctggcagggtcgcattcccttaaaaaaagctgtcagtccttccccgctccagctttgggtggctgtcggctgtcctgggcttccctggtgtggccgcagtgctccggtctcttccctgacttcgcttgggcttctcctctgtgtgtcttctctgtgcatctcctagaaggactcttgtcaatggatttagacttcatcctactgcaggatgatttcatcttgagatctttaacttcgttacatcttcaaagatgctttttcctaataagggtacatctgcaggttctggggagcaggatgtgatcgtatttttttgggggccacgattcagcccgcctcagccctcattggccagaagctggcccatgttggccaaccagagctctgcgcttgcctcctgtggcctcagtccagggtcccagtccttctgcttgcctctacaatgttgtcaccacgaagctgtgctttaatgaagagaggaaattttgcaggaggcctaagaaggccagacaaggccttgcacccagtgcatgggcagatattggtggtgggcatcgtggaaggctgtggggtcaggccaagagcctggcatataggtcaaggttggcgaatatccacctcctgcgaaccaatcctgttggctccagaactgaaatatctctgcagcccacccatctctgacaccacatgccccttgtcccagcctccatgtcatttgtctgtgtctcagcagcccaggtgccttttaaacagcaggatgatggtcacagagcctctgcaatgcttcctgtgtgacaggcagggacccatttcaccctcaccaccaccagtgggatacagctattacctgttgcgggaagtcagggaccccaaacggagggaccggctgaagccatggcagaagaacgtggattgtgaagattttatggacatttattacttccccaaattaatacttttgtaatttcttatgcctgtctttactgcagtctctaaacataaattgtaaagatttcatggacacttatcacttccccaatcaatacccttgtgatttcctatgcctgtctttactttaatctcttaatcctgtcagccaagaaggatgtgtatcgtctcaggaccctgtaataattgcgttaactacacaaattgtacagcatgtgtgtttgagcaatatgaaatgtgggcaccctgaaaaaagaacaggataacagcaattgttcagggaataagagagagaaccttaaactctgaccgctggtgagccaggcagaacagagccgtatttctcttctttcaaaagcaaatgggagaaatatcgctgaattccttttctcagcatggaacgtccctgagaaagagaatgcgcacctaggggtaggtctctgaactggccccccggggcgtacctgtctcttatggtcaagattgcagaggtgaaataaactccagtctcccatagcactcccaggcttattaggaagaggaaattcccgcctaataaactttggtcagaccggttgatctcaaaaccctgtctcctgataagatgttatcaatgacaatggtgcccaaaacttcattagcaattttaatttcacttcggtcctggtcctgtggtcctgtgatcttgccctgtctccacttgccttgtgatattctattaccctgttaagtacctgatgtctgtcacccacacctattcgtataccccctcccctttttgaaactccctaataaaaacttgttggtttttgtggcttgtggggcatcacggatcctaccaatgagtgatgtctcccccggacgcccagctttaaaatttctctcttttgtactctattcttttatttctcaagccagtcgacgcttagaaaaatagaaaagaacctacgtgattatcggggcaggtcccccgataattaccatctgcacttcagtgaaatggaaatccgagtcacaccctgctaatggcttcccagcatgctcagagcagggcttgaactctgtcctgggccagcttcacgggcacacgagctgtgctgtcctgcagggcctacactcagagggcctggctcttggcttaatgctctgctgttgccgtcatgcaagtcttaataattttgaacaaggagcctcacgttttcattttgcactgggctgcaaatacatagctggtcttgactctgtgcttggtgtagaacccccacgtggtctggcagtttgccctccccaccgcctgcccgtgacaggtgatatttgatagctgtgtatcacagtgccctgtagacttgttctttccagcacctaccacaagccatcattgttttatgtattcatttccatagtggtgttcctgactagaccgttctgtgatggctgggaccttgtctggtcctcctgcatgcccggtatattaatttcctgtaggcagttaaagggcaccggcactgccaaggcacagacaaacgacttggaggctgggacaggggacatgtgatgtcagagatgggtgggctgcagagatatttcagttctggggccaacaggactggtttgcgggagatgaatatttgccaaccttggcctatatgccagacaaggtccagggtcagcaggtccaaggtccccgtgccttcaggaaggagccttctctgaggactccgcctcctgtgtgtcctgagcagtcatcctccagcctgcggcgctgagccagtgctgtgctccttcctcgacagtgggctgtgccatctcctgcttggtgggcagtgggctcagaacgaaaatccccgggcgcagcagacaccaagctaagctcaggcaggagagttccctgctgttgctcctgctgacgagacctttgcgcagcccgcagccagaggggctgattacagtgatgctgtgtggtgctgtgagcgtcgggactatcaacagtgtgtccatggcacagaggccggctgctggggcccaccctgagctccgagattgacttggcccagaactttggacatcttcccctcctgcactccattcgtctccacactcactgtggcccagcctggcagtgtctggcatggggtgttgagagtaccaggcttggtatcagcccatggagatttattcaccctggaatcggatcgagcttggactttgggctgggcacggggtagggtgcacaaaggtgggagctaaggttctgaccccgaggagctgacacttgacatacagggcagggcagccctttcccccaccggcagcccaaagagttggcagacctgcagccgccccatcctgcctgcgaggccggtgggctgctcctgtggatgtggtccttttgctttctcttcagctttttagtggtgtccttcctggctaattgcagatatttttcttgcctttcttaaaaaacaaaacaaaacgaaaaaactgcactgtttcctcttaaaagcagtcattgaagtagaacattgtacttacctagaagagtctaaagaagagaatagatatcacctataattgcatcccccaggtggtccctgtcagtatcctgggggcgtggctgctatgtcctttccaccgtatccccagggtgcagggctggcaccttgcaggtgctcaacacatatttgtgactgagtgaaaataatgagcaaatatatatatagcagacaattgaaactataaattgtatttgttttttatttttatgtatttatttatttattttgagatggagtctcccaggctggggtgcaatggcacgatctcggctcactgcaacttccgcctcccaggttcaagcaattctcctgtctcagcctcctgagtaactggaattacaggtgcgcaccaccacgccctgctaattttttgtattttaagtagagaggcagtttcatcatgttggccaggctggtctcaaactcctgatctcaggtggtctgcccacctcggcctcccaaagtgctgggattacaggtgtgagccaccacacccagcctgtttttttatttcacctttttcactctttgtggtactgaccttttccccatgtggacttttctgtcggggcttagacatcatttacttaatctatcccttctggctgagccttgtgttgttgggatgaacatccaagtgtttctatcagagaccgtatctctggtatttccttaaagcacattcctagaagtggccacagaaaggaataaaaaggagcaagcttccttttttggtgttgtattttctgtgtcttcctgcccatcagggcatggggaggtgcacttcagactcgaaggctgatttctgagaactgctgtggttataaaagcggcaggtcagccgaggtgaggaatgaattatgtatcaagctctaagtcagatcaaggcgaatggagttcatacttgtctgaagacagaatgtacctttctggaatcgatcagcggtgatgttgattagcccagaataatccttcatggtgtgttaagaaacacccctctctcctgttcaggaggaaagcagctgacctccatcactgcctcccagattttgtagcttggagggatgtcccagggccccagggctagcaggtcccgcctgacttcagttcatggccaccgagcatctgcaacttgctggatgcactggtgttgtggagaccccaccccagaccatccctgggcacccctgtcctgtactttctgcatctcctgtccataggctgaggtcacatggactccaggaggccaaatccaatgtccagcttcaggtcctcaccttgacctctttggggctgcccgctgttggagtcttccttcttctagacacaccatcttctgtagcctccctggtgctttctctccttctgtcctgttcatggccttccttgccaattttgtctcatctgcccaacctcccaagttagcattccttgacactggagtgttccctcctcgctctgcattcattccctacataatctaatcccaacgccacgactcactgactgtgtggatttaggtagctgacttcacctctctgtgctttcatttcctcatctctaaaatgggcctagtaaaatcctctctcaccaggtgttccaaagatgataggacaggattcccagctcccgtcacaggccctggcacatgatgggtgcctcatgactcttctgctgtcactcactcactcattcattcacgcacctggcggatcctgatggaatgcatccttacgtgctgccctctgttctaggcatggaggacacagcaggcgcagagcaggcccaggccctgcttactgggaacccatcctcgtgtaggggacatagatgagaactaagtcaattacagtttgtcagatggaaaacgagaaggagacgtggtgaagggaagggagagcagaggcgggctttccgaggcagcttggggcggtgattaggctcagtcctggctcacccgcttccagctgtggaccttgatcaggttcatactatttcctctctcagtagttgagtgacatcaccagcagtcaacctctgtgtgtctcagtttcctcatctgtaacactgggtgatatcacctacctagtagggaaggaaaccactaacctctgaaatcgaaaagtccatttctctaagtgtggtcctcacgccctgctccagaattgctgggattgtggatggaaatgcagattccctggaccaccatgctcctcatgcttcaagctctggatgaggcccagggccctgctttttggaagaagcaccttgggagacacaggctcactgatgttggcagaccatggtctgcaggctgctgagatgggctggtctcatcctgatgggagcaggatggactgaagctattccaggtgtggtcacctgggagcctcacctaggagcatgttagaaatgcaaatcagattctctaggggtgggcccaggactccacgccttaacaacctccaagcgattctgctgcagcccccatcgggaaggctctaggtcagtctgggagtggcaggtcatgctccagatgaggcaggtgcctggcccagggtgcccgaggcagggacaccagctccccacccttctgtctctgctaactcagtttccctccttccttcaggatcccaagtgatggtggtttcctcggagggcgagctgagtcctgcgcgactggttagcacggtggagctggtagccacgcctgctggctggcgtgcgtgaacaggtgtggaccgcaggatctcagcactctgacccaaggggaagcatgtcgaagaaaggccggagcaagggcgagaagcccgagatggagacggacgcggtgcagatggccaacgaggagctgcgggccaagctgaccagcattcagatcgagttccagcaggaaaaaagcaaggtgggggttggcgtcagctcagcagcggctgggctgcaaatgtccctttgggcagtgttgcctctgaggcatgtgtgtgaagagcctgttccaggaggggggccgagggggggcacttcacctctctgccctgctgtctgtccctttgcagtacagagactgctgggcaggagtctgggccctaccagtgcttgctgtgaccttcaaaaagccactgaacacctcattctttgatttctcttacctgcaagatgggggttgtcagaagaaaaatgtttgacaaattcagtttagcagagattaactgagcaaagaacgattcgaggatggggcagtccccagaacagaacaggttcagagaaacctgcatgtggtcagacagcattcattatggggacagaaaacagaagaggtgctgaggctacttgatcagttacagcttgacccttgatccatgggtcacctgtgatttactgatgctcagctgctgtgattggctgagcttcggctatttgtttaaaaatgctcctaagtcaggcttttggttagtttgcctgctaagttaggttgcagttcatcgtataggaactcatgcatgaaggcatcctcaggctgaattcagcagggtcatggcggtaccagcttttcctaaattccaaaagggagtagggcatagtgaggtatgtcccacttccccgcttcccatcatggcctgaactagcttttcaggttaactttggaagacccttggtggagaggagggatccgttcagatggtcaggaggcttcaaagtttatttttggtttatgctgccatgaggtcttgtaagccatatatgtgctttcttagatgtgatggggctgtggtctggactcagggctctgctaggtaaagagcttggaacagagcctggttctgcgatatgagctactttcctctctcctaaggcagatttgagctttggagctggtcaggacagtgcctggttgggtgctggcagtctaattaaagcacgggctgtcacagaggggaggagcacaggctttctaggcagacccggtttcaaacctcagcttgtccgctaactggtctcatgatcttggccaggtgactaaaagtctccgaaacctctgtcttctcatctgacaccagctattatggtgtaattatagctgtccggtttaagatggtcatgaggatctgattaatggatgcaataaaaagccccatcaacatctggtgcccaggcacagctgcagtcctatttggtggcctgcttctgacttgggtgggcttgagggtagagcaagcccagggttctgtgagcccagagaggagctgccagccaggctgagcacagaaagagcatggagatgcaggcttgctcctgggtggctcgagcagttgaaggtctatctgaagccccgaaggtgccctctggctcctgctgtagtacctggagtgacgggtggaggctgcttggggaattgcagcaggcgtccctgtcttgttgagctgggactcaggtcgccaatggagtgctgggccagatccagcttccaggtggggacggggctggggcctgggatctggctgcaaccccagctcaggatggccacacagagcagaggctgagttctggaccaggggactgggcttctggaacttggggacagatgcacctgtctccatccctaggtgttcaagattccaggccgagtgcatccagcctcttttagacatggatgctggtgatgctgacctgttcaccctttagccaggtcaacaggccaggtcacctccggggctggggctggggctgactggctgggggtgtaagggctggcagcttgtatctggacatagctacagcagctgtggtgacagggaaagctgctcactcacatcacactgcctgggctcaaatcccctctccaccaccacccctgcctgaggtcttataagctgtgtaaccccctgcctcagttttcccatctgtagatggggacctctaaggtgtctgcctcctgggttgtttgaggaatgaatgagacagtcacacacagggcctgggtgctgcctgtcatacgctcacatgaccatcagggtgacctttacatgcctactgtgcagatagcaccaggtgctttagagggtgtcatgaccctggcagtgacctgagagatcaggtgtggcttcccccgtgttacaggtgagcaagccaagggctggagagggcggggacttgcccaggtgtgttagcttgccagggctgcagtaaccaagtcccacagatagggcggcttacgcaacagacgattgctgtctcacagtcctggaggctggcagccacagatccaggtgtcaggattggctccttctgaagcctctctccttggcttgcagacggccgccttctccctgtgtcttcacatggctttctcctctgtgtttgtccatgtctgtattttctgttcttacaaagacaccaggcaaatcggattagggcccaccctaatgacctcattaggatctatctccaaatggaatcacatcctgaggtcatgggggttaggacttcaacatatgattttcagggggacacagtttagccccacacacgaggccagcacagtaggtggtattgcaggattgaaagccaggcccatgcggaccccaggctgggcctccctgttaccaggctgcctccctgcctctgggacgtgtggcaatttccacttggatgcacgctggctgattattttctcaatccagccatccatgtggccgcttcaggttgactttacccatctggctgctgggagaatttcaattctctgagaattcagtaatgtgcttattgactggtacaaaaaacataaatgcaaactttacaattgcattgaagtgttactttgatatgatctcacaatcactgtcaatgtcccatttaaagtgctggcattttagcaaagcatccctgttgaacactgtaggatgaaggagggtggtaaacgtgtctgtctattcatctgcaaacccctggcatgcatgctccatgcctgggctgagtgagaagtgtttggaagtaactcagagacagaccctgtcctcaagtcgcatgggtacagagcctcacaggaaaccagcaatacagcagccctgggcacattccatcagaggttttagaaaatagtgcagggacaagcagaacccaaggcttcacaggggcagttttgtgggggttttgtggagcatttccttactttctggcattataagatgccccaggctccgcagtggctcatgcctgtaatctcagcactttgggaggccaaggcgggcggataatgaggtcaggagatcgagaccatcctggctaacacagtgaaactccgtctctactaaaaatataaaaaaattagccgggcgcagtggcgggtgcctgtagtcccagctactctggaagctgaggcaggagaatggcgtgaacctggaaggcagagcctgcagtgagccaagatcgtgccactgcactccagcctgggggacagagcgagactccgactcaaaaaaaaaaaaaaaaaaaaaaaaaaggtgccccaggcacatcttgtatatttcctaccccagcgctagacccagcagtttctctaaggggtcctggttccttttattggagaatggcattagaaacaaagatccaggcaccaggcgtgcccatcactgctgcggtgtcattgtttctaggccctctcagctgccagaacaaggaatatatatgtgtatactgacctgcgtatgtacgcatacctgtaaatatttccatatatgacatctatatccatacaaagtcaaacatgagttcttacagatgtcccaagacgcatccactgccgcatggctcccttcagcctcctcttgcttgtctgtaacctcttactccaagtgggaaacctggcttccccctctgccatccactttctttgttcaacactatacatgtatgatggtttcagagtagtgaactggtacccatgagatttagagggctttgagcatggagggtgtggcggggagggctgctgcaggtggcttgggcaagggggaagtggggaagtggccaggcctggacatggagagccagtgctgctggattggatgaggatgaggatggaaaggggtgaatctgactcactctctgagtgggagtggcaagtgagggtggtgctggtggttcagataatttctccacgccagcccccacacccccagggcatgctccctctcttggcctttgtgccgtggctgcatttagagtccaagtgctgaggagcggctggtgtaggtgcctctacacttggggtagcttggaggcacctggaggtaaagtgctgggcggctttttttggcctgctcagctggatggagtggtggtgggagggagtgctctgtgcccatcagaggtcaccccagcctcactctgctgcttctgtggcataggtcatgtcacctgggcttggctctcagcagctttgggcagagctggagggacccagcagggccctgtccccaggcccctgcctctctgtcaccatccctgccctacacacctggatcaccagcctcagcagcacctctgcccctcccaggaagcagcccctagacgccccgggctgccctgcacaggcctctgcccacccttccatgttcctcaccccctttctacctgtgtctctcacacgaggctgcccacccctgatgcagaaagtcagaaccacgataacaacagacttccattcacccacccacagtcacctcatcttcctcctctcaacgggcctttgaggggcagctgttgccatccctgtttcctagtagaggaaactggagctctggaaggttgtgtagtcagggttcttcaaagaaacagaaccaataggttgtgacacacacacacacaccccccacagagtgagaggttgttcgttagttttaaggaatcggcttatgcggttgtggggctggcaaatctgaaatgtgtagggcagaccagcaggctggagattcaggcaagggttgatcttgcagcttcgagtcccagtgcagccgggaggcagagttccttcttccgcaggggacctcggtcttctcttaaagccttcgactgattggatgaggcccacctacattgtggaaggcaccgtgcttcacccagagtctactgatgtaaatgttaatctcttataaaatgtaccttcacagccacatctggactggtgtttgaccaaacgactgggcattgtggcccagccaagtcgacccacaacatcagccaccatagaggcagagaaatttgcctggggaaacgcagctcatcaaagcagattaggatctcattggatctgaccctgctggccccagatggctgtcggcattaaccagggacttgactgttgcctcgcaggagggagaacagtcaaaaccattttgtccataactgggacaattctgttaaatacttaaagttctggcttcctgctgctaaatccactaggaaaagatgctgattgctgcccccagggtaaggtggacagaacatggactggtcgcctggcttcattcctatgattgtgagtatctggtgaaaggagatgttgatcttgtgtgtttgcctgggttggttttatttgcttttttacctgctgttttaagtaaggatttatcaatactcaggtgccattgtaaaacttctcacctaaaattaattttaacatgtgactatgctatcaacagtgtggtctggggaaaaacattgccattttccctggaagcagcttgtccaccagaggcaattcatttcaggtcttcagagacgggcagaattcaggaaataagggcttgtcaggcgttcctgtggaatgtgtgttgagtgatatttgaaacaaaaaggttaaagaaagcattttgaagtgttttaagaacacactcccttgggacgttttataagtaatgttttgaattgtttgctgataaaatgaataggctcaaggcggggtgggttgcctggtagcacagggtcctcatccctcaccctgggcagctcaccagactgtctctgatctttggctgcctcatgataaaacagaggagagagagaggaagagagagagagagagaggagagagggagaaagagagggagcacgctacttccttcccaagaccgtgaggggttcatgtggcaatgtgggtgatgcattggagcccccagcccagctagggaccccactcaacaagaatggtgccccctgctcactgccccccaggacttagaagcctggtctgtcttttccaactccacagtccgcgcatggggccctggaaatatatttctggtttacaatcttttgggtcttggtgatgatttctgcagggtgtgttttgtgattgagcagtcgtctcaatttacaacctggaagagatgtcaaaggcttgaatgcctctccagcatcctcagggggtttccacccccagggaaagtctcagggaactagcaggagagattctaagtggggctggcaggagggtcaggcctgcagggcactgccgaagggggaatccatgggaacgtgggcccaggtgggtgtcttgggcgtggggaggctgtggccagctcccccagctgtgaccctgaccctgaccctgaccctgaccctgaccctgaccggctctctcgccgctctggctgcaggtgggcaaactgcgcgagcggctgcaggaggcgaagctggagcgcgagcaggagcagcgacggcacacggcctacatttcggagctcaaggccaagctgcatgaggagaagaccaaggagctgcaggcgctgcgcgaggggctcatccggcagcacgagcaggaggcggcgcgcaccgccaagatcaaggagggcgagctgcagcggctgcaggccacgctgaacgtgctgcgcgacggcgcggccgacaaggtcaagacggcgctgctgaccgaggcgcgcgaggaggcgcgcagggccttcgatggagagcgcctgcggctgcagcaggagatcctggagctcaaggcagcgcgcaagcaggcagaggaggcgctcagtaactgcatgcaggctgacaagaccaaggcagccgacctgcgtgccgcctaccaggcgcaccaagacgaggtgcaccgcatcaagcgcgagtgcgagcgcgacatccgcaggctggtacgtgccgccccctcccccgcccgcgggcacgcggccttccctccctgcacgcatgggggaaatgcggagctccgaggacctgctgtgctccaggcattgttcaaagcactggggccccagcaacctccctcccgtcttaggtgtggtaaggaggctttggggctgcaggtaatccgctcaaagaacagttccccatttgtcaaaggagcttaatggagactagcgagggttgttgcaaatgcctcgtgatagcatatctaagtgtcgggcatttattgattcatttacttcaacaaccatgagcagacttccatctccaggtaagatgccacaggtcagggcaggccggccaactggctgcaacagcaagggaaaaatataaattgcaaatagtcctgttttgaaagatactggagatctgtggaagctgtggagtgtggatgaactaaaattccaaagggaaggggaaagagccctgcctgggcggcctaattgccagctgctttcttcccttggggcatttgtggattctgggtgcgggctgaggattggatgtcctcagagagatgagtaggacttttctgccatctcagagtgggcatgaaacaatggaaaccagaggagccccacctaggccagcttgctgcacaggagatcctcctgagtcctggagtgaagggggaggctggcgagcccagctggaaaggcagaatgacagctcccatgccctcactggacgtaggagacaaagggagggggcccgccacaaacacatgaccagtctgcccctcagggcgtttgtcacactttgaagctgtgtggggcaggaggctaagaagtaaagtaagctgagattttcagactggatcaaagagtaacagtgatatttacaagagagacatcttaattatgaggacatggtgacatggagcataagaggatggggaaagatacactgtgcaagcacttcctaaaagcaaagctggtctggctgtattaatgtcaaaggctctaaggcaagaagtaatactaaagacacaaaaggacagttcttaataataaagggtcaattcagtgggaatgcattcaataacaaaacctcaaaatgtataaaagaaaaaaattatcaacactaaaaggagaagcagacaaatccacagttatggctggggacgaacacgcttctctcagcaaacagtagaacacacagacaaagaatgaataaagacatgatttcaccaacacaattaaccaacgtgaacttacctgacagagcactctattccacaactgcagaatactgtggacatgacatacttttatcattgtagaccacatttcaaaatttgtgggttgtaattagtccttagagcaaaacatattttagacaaaaagaagaaatgctgaaaatcaagcatctaaacttctctctcaagaagaaagaaaaagaacagcaaattaaactccagagagtagaaggaaggaaattttaaagagcaagaagcagtgaaataaaatcaataaagaaaatcaacaaattcaagagttaattaaaactgataaattgacaaacatttagcaatattgataaagcaaaacagagacaataaattactaatatcaaaaatgtaaagggggaaataccacagctcctacagtcaataaaaccacagcaaacagcatataccaataaacttgaaacctcgataaaatgaacatattccttgaataagcacaatgtaccaaaactgacatgaaacaaatagaaaatctaagtagtcctaaagctcctaaataaattaaatctgtaatgaataattttcctatgaagaaaggcccagacctagatggcttcacaagtaaattctttcaagtgtttaagaaagaagtaaaactaattctagccaaagtcttccagaaaatagagaattaggaacacattttaactaacttatgaagccagtgtaactctgattccaaaagcaataacattacaggataagaaaacttttggattaccttttatgaacatagatacaagagtacgagcaagatattaacatatcaaatccagcaatacataggaaggctaataagtcataacccagctgggtttattctgaaaatataaagattggcttcatattctaaaatcactgaatataattcaacataataatatgataaaaaagaaaaacgtggtcagtcatcttaatagatgcagaaaaatctgttggtaaaattcaacttcatgatataaactctccgaaaaccaggaaaagaatggaatttctctaatatgataaatggttctatcaaaaatcttttacaagtaacatacataatgatgaaatattgaacatttcccacccaagttcaaggtcaaaacaagatgttgactattaccacttctagtcaacattgcattggccaggatgtcaaatataaaataaaataaaataaataaaagtttcattgggaggccgaggcaggcagatcacgagtttaggagattgagaccatcctggctaacacagtgaaaccccatctctactaaaaatacaaaaaatcagcggggtgcagtggtgggcgcctgtagtcccagctactcaggaggctgaggcaggagaatggtgtgaacctgggaggtggagcttgcagtgagctgagatcgcgccactgcactccagcctgggcgacagagtgagactccctctcaaaaaaaaaaaaaaaaaaaaaaaaaaaagtctttagagagggagaaaaaagggaaactcattatttgcaggtgctatggttgtgatgtagcaaacccaagacacctgttttagttcattactgttgctataacaaaataacacagactgggtaacttatatataatagaaatttttttcttaccattctggaggctgggaagtccaagatctaggcactatctggcaagggtccagtttctgcttctaagacagtgccttgaatgccatgtcctcacatggcagaaggagtggaatgacaaaagagaggcaggcagctcatatttctcttataaggtcactaactcccttcataaaggctttgccctcatgacttcatcacctcttaaagaccccatctcctaatactatcacactgatgataagtttcaatgtatgaatttttgtgagacacattcagaacatggcaagaccctacaaactattagaattaataagtgagtttatcaaagtctacatatacaaggtacatacacacaaataagttgtttcaatatatcagcagtgaacaattagaaaatgaaatcttaaaaaatatcatttacagtagagcaccacaaaattcaaatacctaggaataaatctaaggaaagttgtgtaagatgtctcccctgaaaactataaaacattgctgagaaaaacttaaggagatctaaatcaatggaaagggatatcgttttcatcgattagaagacttagtatagatatcagtttttccatgattgatctacagattcagtgctatcccttaccaaaatcccagcagactctttttttttttttttttaactgagtcttgctctgttgctcaggctggagtgcagtggcgtgatctcaactcactgcaacttctgcctcctgggttcaagcaattctcctgcctcagcctcccgagtagctgggattacagatgcctgccaccatgcccggctaatttttttttttttttttttttgtatttttagtagagatggggttttgccatgttggccaggttggtctcgaactcctgatctcaagtgatccacctgccttggcctcccaaagtgctaggattacagacgtgagtcaccacgcccagccaccagcagactttttaaatgcagacatcggcaagcagattctaaatttgatgtaaaaattgaaaggatgtggaatcacaatcttgaagaagagaaaaattggaggtttcatacaacctataacaaagtttactacaaagctacagtaatcaagacagtaggctgaaggttagagagacacgtcaatggaacagaagagcccagaagtacatcttcacgtgtgtggacaaagataccgtggcagttcactatagagaggatgatctttcaatggacaatattggactggtcagctatctgtaagaaaaaaaaacaggaaatacacacacacacacaccacacacactctctgtatatagagtatgaagtctatatcatactacccacaaagattaattcaaagtggtccataggcctacatgtaaaaagtaaaacaatatagctactagtagaaaacagactattttcatgatcttgggacatggtaaatatttcttaagcaggacacagtacactatttacataaatatactattcagagagggttgtacattggacatgaaataatcattgttcatcaaaagacactaataaaagagagacaaggcaaattacagactgagagaagacatgttcaatacctataaccacaaagaacttttgtgcagattataaaaactataaaataatatgaaaactcaaaaatgggcaaaagcttgaaagaatatttcaaaaacaggataattaaatgactaacaaatatgtgaaaaggtgttctacctcattgatcatcagggaaccagagtaaaattacaactagatataaattctcatccactagaatgactattaaaaaaaaacagacaatagtaaatgttgactagcatgtggaggaatgggtaccgtcattctgataggactttaaaatggtatagccaccttgataaatggttttgtagtttcttaaaaagtctaaaaaaaggacacctacggactctgtaattctactcctaagtatctacccaagagaaatgaaaacacatatctatataaagatttgtacatgaatgcttatagcattataatagtcaacgaatgggagaagcccaaatgtcctcagttggtgaatggataaatgtggcatgtctatataacacaatgtgattcaacaatgagaaggtatgaaatattgatatatgcttcaatatctataacatttctgaacctcagaaacattatgctaaatgatagaagctagacacaaaagacctcatattgtatgcttgcatttgtatgaaatctccagaatagccaaatctatatatccaaatctatagtggctgacggggactagttggaatggagattagctgtaaatgagtgtgagggaccttactgggcgaggaaggttctgaaacagattataatgatggctccacaacttggaagacttactaaaaatcggcgaagttcatgatttataaattaaactctaaaatgtttaaaacaagaaaaattggaaatttaaataggattgataaaagtttaatggtggatcttgtatttgcatttaaaaggagcatatttataagaggaagaacagcacacaatgaaacaacactgcccaggcaccaggatggctaaattaaaaagctaacagtgctgagaaatggcaaggacgtggagcagccgtgcccctcggtagcatcccatacactaaagtgccctaaaacgaaacagagacatctgttaactcagaatttctcatcaagcaaaaaatattattttacaataagagtgaaataaagacattttaggtaaaaggaagctaagattatttgtcgccagaggctgtaccaccaaaaatgctaaaggaggttctgcaggtgaagagaaacaatgccagataggaatttagttctcttggaagggaataaagaacaggagaagtgggtaaaggagagtcaatgtctgagacgatctctttttctcagtgtattcaaaacacaagtgactgtttaaagcaaaagaatcagattgtattgtggggtttatgacatatgcagacgtaaaatgcataaaacaatctagaaaggatggggtgggggtggttggtggaaaatggatctgtgctctcgcacagtccttcagtcttgtctgagggggtgcgtgacgctatgagttcaaggaggctgtgacaaatcaaggtttaaaaaggcagcacaaggaggcacagataaaaagcaaatggggaaataaaatgagagactaaagaaatctgtttgcactaaaagagggtagcaaagaaggaccaaagcaggggaaaaaaacagacgagacaaatggagaagagacagcaaaacggtggaattaaaggagtcatatcagtagttacattaaatgtaaatggactaaaccagttaaaaggcagaaattgtcagagtggatacaaaagtcacactttaaatataaagacccactttccctgaaggaaaaggatagaaaacatgctctgtgagcaataaatgtagcaataggatggataaaggtgtatttagtcaatgggatattacacagcactgggaaaaaatgaatttccaaaacaggcaagaaaatgaatgaatttcccagccgtggtgtcagaaccaaaccaaagaagatgagcacaaaagctacatactatatgattttactcacatgaagtttaagaagcgtaaaaactaatctaaggtgctagaataagagtgtggatgacctccgggtgtggggttgatcaggaagcggcaggagccagccttctcgagcatcaggaatcaatctttctttctttctttcttttctttctctttctttccttccttccttccttctctttctttctttttctttctttctttctttctttctctctctttcttcctttcctttcctttctttcttttctttctttctttttctttcttttcttcctttctttcttcctttccttctttctttctttctctttctttctttctttctttctttctttctttctttctttttctttctctctctctctctctttcttccttccttcctttcctttcttttctttctcttttctttctttccttccctcctgcccttcctccctccctcccttccttgttccttcagatgaagtttcactcttgttgctcaggctgaagtgcaatgctgtgatctcggcttactgcaacctccacctcctggattcaagcaattctcctgcctcagcctcccgagtagctgggattacaggcgcctgccactacgcctggctaattcttttgtatttttagtagagacagggcttcgccatgttggccaggctggtctcgaactcctgacctcaggtgatccacctgtcttggcatcccgaagtgctgggattacaggcgtgagccaccgcacgcgacgaggaatgtttcttttctgacctgggtggtagttgtgtaaagtgtgctcaggcaggcgtggttttggacagcaccttgttaaaccagactcatgcgtatcagaaccatgttctcgaactccaaactcgacactacacttttgttatctctgattcaagtcacagttaccgctaatctgtcccacaatgtaagtgagccataaagggcattgcattttaattattctttccggttccacggagagagctttcactacctctgaaatattcaaagccagacaaaaacctgacatcctggtcttgggtgcttttgatcaagggaaccagattgcgtttctccaagctgcctaaggaagcgtgggcctggcttttcccatggaatggttgactcacaccatttgtcaaatgatgatgagaatgaacgcttcttattgcattttttgttgcaaaatggggaagtgatctgtaaagcttcccccatccttatggagttttccaaaggtggtatagaaataggttgagcatccctaatccaaagtcccaaatgctccaaaatctgaaactctgtgagtgccaacatgaagtcacaagtggaaaattgcacacccaacctcctgtgacagatcgcagtcaaaatgcaggtgtacaacgcagtgtatttagcatacccaaggggaaaaaagatccccctagcccccatcagctgtgatagagcttccatacacacccagactccccatgcaagcaagctcacatgttaccatgagcacattatcttctccactgtatcagtggtatgtgtgaataagtgtaagaagtgattacttattggtagcatataaattcagagtcagaacggggcgagatggctcatgactgtaatcccaatacatcaggaggctgaggtgggaggattgcttgaggctgagagtttgagaccatcctgggcagtgaggtcttgcctctacaaaaaatttaaaaattagccggacatggtggcatacccctgtagtcccagctactcaggaggcccaggtgggaggattgcttgaagccagcagattgaggctactgtgacctacgatcatgcccctgcactccagcctgggtgacagagagagagtctgtcttgaataaataaatacattcattgtcaggaatgatggtgatgccaaacaaccccagactgtcaacttgggtggctgagacagtgagaactttgccttccgatgtttcaatgtacacagacttttgtttcatgtacaaaattattaaaaatattgtataaaattacctttcagctatatgtataagtgtatgtgaaacataaatggatttcatgtttagacttgggtcccatccccaagatatctcactatgtatgtgcaaatattccaaaatccaaaaaccctcaaatctgtaacacttctggtcccaaacatttcagataagggatactcaacccgtactcccattttacagggtaaaagttaagtgggaattttatactcagcctcaggccatggatcctctttcaaaactcaattctgaatgatacaggattaaaagcaatgtccaatgggatctgaaaatgaatttgttataatgataatgacaaatattattttacccccagtttcctcaacagagtatttgatgcacagatggcatgcaggcctttagaaaaatggagagtgaagatatagcctgggaaacagtctttaaacaatgtggcagagggttaacatcctcagtgtataaaaagtttgtcaagtttacaagaggaacaatgggaatttataattagtcaaggcatgggaacacacagttcacaaagaaaagcaatgcctattaaatataaaaattagtttaacctcaccggtcatgaaatgcaaattaaaacagcaggatgctatcatacccaatcaaattagccaggatttttttttaaaggtagggtgtaatttaagtgtcaaaagagaagacagcaggtgcctttggcaggttgttctcagccccagggcccttgcacaggcactcctgtgtccttggccgggagcgctccagccccgatctttgcaccgctggttctttctcactgagtagctcccacctcagtgtcccttgttcagggaggcctgcctgagcatcatctaggccagccccgagtcactcagttatatgccaccttttcccatccttgccacagcacttctcatctgatatttttctctctctctctttgattatttcttgtgtgttttcccctactaggatccaagttctgtaaggacagggactgagtctgtcttgttcactgtgaaagcccagagcctgtgcagtgtggtgcatagcagacgccccccgcctctgtgcaaacaacagctttatgcacgctcctgccctttagtgtgctaattccacttccaggagtctaccgaaggaaatgtgcaaaagcatgcacaaatcttacgtacacatcagatggcaccgtgtgtgttctgccagtggtctgttgcatccgcgtttgctgcctcgagtttctgagtcaggacaatgactcaggcatttatgacaagctatagggacttgggaaagtgaacacagaaggttaaaaaacaggatgtatggctgcaaacaggactctgtcttgcagaagtagaatgaggggaagcaggtgacaggttggcaggggctgcctctggatcctgacatcatgggggctttctgtttccttctctgttctttgttgtatttttaattttccttccttcctttcttctttctttcctttcttcctcccttcctttctttctttcgctgtctctctctttccccttcctttcttccctctctccctccctccctcccttccttcctttcttcctttccttccctttttccttcgctcctttcctttcttttctttccttctttcttctatttccctcctcccttcctttcttcttcctttccttcccttcttccttcctttgctcctttctttttctttcatttccctctttcttttctttcccttcctctctctccccttcctccctcccccactcccccttccttccactttccttctttccttccttcctccctccctctgtcccttccctccctcttcctttttatctttcttctatcttttttcttttttgacagggtcttgctctgtcgcccaggctggagtgcagtggtgcaatcacagctcactgcagcctctaccttccaggctcaagcaatcctcccacctcagcctcctgaatagccaggaccacctatgcccagctaatttttttgtattttttgcagagacaaggtttctccatgttgcccaggctggtcttgaactcctgagctaaagcaaatgtcctgcctctgcctcccaaagtgctgggattataggcgtgagccactgcgtctggctgtatttttcattttctataatggatctgcattcctttcctaataagagttaaaactttatttttgaaagagtgccactgttgggaactagtttgacaaggtaggaggaatcaaggcacagcttaaggccttgggcctcaggatctcaactaggagaacaggggccgatggaccagcctaggctgggtgcccgcagttcctgagaccccaggggccccggaggttggtaggtttgtttactcccatgcctgtctgccaagccctctcactggggccaggctgttttcttagcacgattcctcctgtcagttgggtaggagtggcccatttctggccttctcagtggccctttcgcatcaagcttcaggcagctgggagataaaggagagtgttttctttctttttttgccagaaaattacggaagagaggctatatattttccgggcactccatttggtgagcacctgctgtgagctagacccagggctagcacagattgtttgagattttattttatgcttttataaaaccataatggttgtttttaaaactcatgaactgacagtggcatgtgttcgatgcatgttccctatatagatgcctgctgggccagcctctcgggggagtcctggggggccatggctaaaaccctgcctggccatctgcagggagctcgcagtctactggggtgacaggtgacacccgctcccatgtgatctctgcttgggaggtgaagggcaggacatctggggactgcccagccgagccagggtggcagaaaagagggaacttgcagcctcctgggcaggtgggactctggagccctgcacacaggttgaccagacacattgagtggtggtgggcagaggcactgggccaggacttgttccccaccgactcctaccacgggcaaacctggctccttctttgaggaaagtgacctcttcccaagtaagcatcattcctctctggagacaggatacttttcagggcacggcagccacacctccctgtacaggtggacatcattcattgtaatacaggaggtgtctggttcaggaccctgaacttcaagagactgctgacctttatgaggtgactgttttgcataagaatttgagtgattgtttctgaagctgtctttttgggacatctcgttgggttggttatcagccttggaagcagcacatgatctggactcgctgctaattgctgcatgttaatagtaaacaatcagtttaatgggagctggacactgtttatagtcatccatggccatgaaatttgctgtcagtcagaatggcccaagaacacatatagccctgggcaggagagctccccctcagttgaatatttatttactgagttatagagaaaaataagacacgattccaggcagcaaagcgcttacagttaactggagtgtgagcagattattctagtgtgagcaggacggtttggtaataggaccatgcaagccaaagaggcagcaacaaagaagaggatgtgatcacttctgtgggtagatgcaggagtcatttcacagaggaagtgaggtgtgagctgggttttgaaggatgcataggagtttgttaggtgatcctatgcagagggagaaacactggcaaaggtttggaagtaatggggcatgatgtgatcattttaaccatatctctaaaatagccatgatgatatgtgatacttggattcccagtaaaatacaaaatgaaaatataatggaatcctgttgtcaagtactggagactttattttcttacttttaataggagttctaaaagtgtgaactatttctggcaaaaggtatagatgagatcacaagcaaacaccttgtgcccaccacacagtagatgaagcatcacaggtagaatcgaggcccctgcacctgaatctgggggaatgatttccaggaatgcgtttctgtttctatctcccatgcatgtgatgatgaccgatatagtgggtctgcatgaacactgaaaaggttttctattctctgccttccaatgacttggggtcaaggaccctcttagaaggggccatgcttccctgcagacctcactatgctgtgcactgagagcttcagtgacagaataacgacgaagggtattttgcttatattctatcttttcctcctatagactttcatagctgggcagaaccaacaatgttctctcaatggcttaaaacccacctctgccaagccccgtgcattcccagaggagcaggaagggggtgtggccatggggaggggagcctgcggctgcaggtgggtggtgctccagtttcctctgggcatcggtacacaagcccattggcaggaaatggttcttcgcccagtgtctcattttgtagcacaggaaggagatctagggaaagtgaatgacttcagagagctgaagtgcctgtacccacactggccccctctcactgacagtacagggctcctctgcatgcaggctgtgggctggccgggattccaccacacctggagtgtgctcttcaggtgaggacggctgggagggagggggcgggacacccagtgaaaggcactgagggtgttgctggggtagaagggagttctctcttttcttttccttaccttttaaaaagtcctgatgatttgatgatatattcatttattccgcaccctcaatgttggaaagactctgagattccaaaggttcttagaaactaagaacctcctggagaggtagtgagtgtcccagcatggggagagtgtaaactggggctgggggccctctgcgggagatgagatgctggaagagattttgggactggaggcaggtgacaaggcacccttttaaagtcctcatccagctatagcctgggtcccacagttggtgacaaaccaccagttcatgccttaaccccatactgtgccaagaatggcagaagagctgtgtgtcagtttaaaatttctgatttatagacagtgcaagcacaccaatactgagtcctcaggaacagtctccagccccttttctctatcacgtatgttcatgggtttgtgttcaggggagctgtcatcacatggtgggaagagaagcctttggagagaggctgccctgagtgattctgggctccccatttgtttgccatgtgaccctgggacaggtggttactgtctccaagcctctagcacctcacctataaaatgggggtattcccatatctgccgagagttagaattaaacaagcaagtgagctaaagcatgtagcagcttatagtttctgtaataggatacttgtaaaatgtgttcttctgttataggaaaaatgtatatgtaagagaagtaaaatgggggaagaaaaactctgtgtatttgcacaagagacggtttgagcttaatttaaaatgtgccagggatccagtatcacaaaggctccgtttccatttcagtgccaaacaaaaatctcccccattcaggtatctcattgtgtggatggttttcacccaaaatggtccacttaggagaaggagtgaaaaaatcaaacgttcatttctcctattcacccacaccctgtctgataaatgtcactccttaagcaaacctgttgcccatggcaacacattcagaagatgggctgctggtttcatttctttgtcagctggattggattagaaatgcaagaaggcttttggacttgtgtctacacattaggatgcatcttagtaaaagtcaagaagaaaaggtggttatggtcaacctggggtggcgatgctctagtttaaggcagtcatggtcaacgtggggttttgacactctaaggacgtcatggtcaacgtggggttttgacactctaagggcgtcatggtcaacatgggacagtgatgttctagtttaaggtggttatggtcaacatggggagtgacactctagtttaaggtggttatggtcaacctggggcggcgatgctctagtttaaggcagtcacggtcaacatggcgttttgacattctaaggcggtcatggtcaacgtggggcagtgacgctctagtttaaggtggttacggtcaacatgaggcggtgacactctagtttaaggtgatcatggtcaacatgggacagtgatgttctagtttaaagtgatcctggagcccatactgcgtggcctgtggcttctgagaaaccctggtgtggtgctctgttagtttcctgggggcagctgtaacaaattaccacaaacttggaggcttacaacaatgacatttattttctctacggttctggagtccagaagtcccaaatcaagatatcagctgggccatgctcccttggaaagctctagggtgaaagtgttttctggcctcttgcagcttctggtgtggccggcagtcctcggcatttcttgacttgcagtcgcaccacttcagtctctgcctgcacgtggccttctcccctgcatgtctgcagcttgtcctcttctttttcttctttttttttttgaaatggactctcactctgtcacccaggctggagtgcagtggcgtgacctcggctcactgcaacctctgcctgccaggttcaagcaattctcctgcctcagcctccctaatagctgggattacaggcatgcaccacctcacctggctaatttttgtatttttaggagagacagagtttcaccatgttggccaggttggtctcagactcctgaccccaggtgattcgcctgcctcggcctcccaaagtgctgggattacaggtgtcctcttcttttaaggatgccagtcagtgggtttagggtccaccctaacgtggtataacctcatcttaatttgcatcttcatttcatctgcaaaggccctatttcgaagtaaggtgacattctgattttcggggtagatgtgacattttgggggacattattcatcccactacaggtaccaagaatgagaattgatgttgaggtagtggcctctgcttcagtctttgattcccccaaactttgcaataaagtggagctcaccaaatcagtcatgggtcagtgggcttgttttcactaagatacatttcctggtggacttgactgcttagaaacaaccggactctgttcctttggggcagaggggacagggaggacttggagaggacaatctgcacttgagtcatggttctgctgctaactagagtgttagcacattcccctttctgggcctcaagtttgtgtgtaacttggggtaaatgatgtccactttgaggatcttttaaagactcagagagtgtctcttaagtacaaatgagtacctagctcacgctagcattaagagaggagtgatagccaacatcaagtttgtcgttcttccctgaactctgttgattgtgattcttttggtcgcaagtgacagaaattccatcaaaccagcttaggccatgggtgtctgttggctcccccaactgaagtcatgggatttgctgtaggtgcagctccaggtgcactaacgatgtcatccaggatcccaggttcttgggctctgctctgcctcctgctgtgtcattcccaggctgtgggctctcatgctgtgctggggggatgccaccactgtgccaggtcccacattctcacaccacacagcccagagtccctttcttagctcctaaagaaaaacaggaggatcctggtgctgcctacttctggccattggttctgattggattgtgcatccatccctgaagcaattactgttgggacagggacatttgggtggcatgagccaattggggactgccctgggaacttgcagtgatgttcgttccacccctttcctactgcacatgctgagactgggcgtatgggagaaggggaaatggatgcgggaaggaagctgagggatgttccatatggtcaggtgagcagttccaggaagcttgagatttcatcagcatcccaagggcagcgagataggatcactaagagctcagcttgtgatccaggagtaaagtcagtgaactgtgagtgtgcctgcctcttgctacgtgagcgtggccagtgtcttaacctctggggcctcaggactctcatgctggctccggaatgtgttctgcattggccctccgtccgtttctagatgccatctctgctgtttgagaatattttctaggaaactttcttgtgatgactggggcagaagccctctgtctcacttactaggacaagggggaattggtgctcttccaggtggagaatttgggatcctggagatgtcttgctcgcgacggtgctgtcttttgtggggagctagtggaaggcagtggcgggggcttcactgcaaagctgatactgaggggcagacaagaaccctcccttacccgtgatggacaaactgttggtttgcaacaccctccactgcctctaccgatttcctttgctttgatgttgttattgttttttttccccctcatagcacaaatcactctcaatcactacaatgtctgcttatttattatgtttattgcctgctccgcccactagcagaatagaagcccctagggcagggcggctggtctcttttgctctctaatgtttctcagcacccactgatagcgctcagctcagcatgtgttgagttaatgaaagcgtgcttgagtgaattaaatgaataaactccttctgcataatgatttttgctttggggttggcatctacattggcagtggtgttttcagcatgtttaaagattcctcctgtggaagggacagtgctcctacccatttggaaattgcaacactcgggatttgggatttggcccaagcaggtagatgctggtggatcatcaccagggggagcagtgggcacattcagcagctgcttaggagaaactgcatggagcacccattgcaggggccaggatatcatcctggcagatggaaacagccttttgtcttccaaagaaaggtgcctcagagagctcttaagtacaaattagtacctagctcacaactagcacataagagagaggtgatacctctggcacgttttttgttctttcctgaactccatgtcaattaggattattttggttgcaagtgatggaaattccacatcagaactgtagcaccgtggtatgtggctggaaaacctctcagtctggaatctaggagtaccatttcctttcttctctcatctctatgttatttttttcagtttttagtggtcttcttttaaaataaaatagcctcgtgttacctaggggctagaagagattaacagtggcagtgaacactgatggcaggcttgcgatatgctaggcactgtaccaaattcttctcatggttgctctaaagctcctcaacagttagacagagttggttctaaagtcttcctattgtccatattttacagagacagaagttgagtcagagaggtggcccaacctgcccatggtcatatggtcagggttggggggtgggcgggattttagcctgcttctctctgctgtcagaagagggcccttcacccgaattctctgctgtggcagtctgtgtctgaaatcaaggtttatgatttagaagtaagagctttggattgtaatccactgaaatgtaacttgctacgtgagtgagctgagcaggaggagcctttgcatctgtttccttgcagctgccgcaacaaataatctcaaacttcatggcttaacatgacagaaatgtgttcctatacagttctggaggccaggagattgaaatcaaggtgtctgcatgcccacacttccccctaaggctgtggaagaggatctttcccagcctcttcctgatgctggtgttgctggctgaccttgagttccttggcttgaggctgtgtccctccagcctctgcctccgtccttacacggccttcccctctgtgtctctcttctcctctcataaggacaccagtcataagggcccaccctgctccaggatgacctcatcttaactaattgcacctgcagttaccctctttccaaataaggtcccattctgaagttccaggaaggccatgggtcttgggggcctgctattcaaccaggacagtgccttcactggagcatccagaaaaagccagagtggatgacctggggctgacacttcctctgcatactttttttggtgtggttcctcactgtcacccggcccactgtgttgagcctgtgtcctttctgacactcccccgtaggaaggctggacaagacagggctgggggtgaactgaagattaagttcaggtttgtacgtggagaggctgtggtccctccgagatccaagcagaggtgtcaggcagccagctggttctgtgattgtggagctcagagagaagccagggctgaggcatgtgtttaagatctgctgcatatgtggggttgataccgtcggggaggacctggctgcctgggagaggatatagagtgagaagaggcccgagccttggaaactccaggcttcaatgagagccagagcaagacagtctataaagaagatagaaaccatgggaagtggccttggggagagggagcaggaggtcgtgagtctgggagtgggtgacggagtcagggcgggaggacaacgttgtccggtgggttcggtggccaggagagcactggtgaccttggcaggagctgtctggtggtgagggttggggagttgtggccaggcaggagagggtcaatgactgagagggagacatggtcctggagacggagagagaagccagctctgccaagaagctgagctgcagaggcctggctgggggccggcagtgttttattgtatctcattaaagtgagagagacaggagcatacactgatgtcagtatgcatgtcaggttgaatatgtatgtgcttcaacccttagctctgtctcctctgtcttgtgggagtgacggggaacaagccctgggctgcgggctgtgcttgctctgtgtctggagtttactgaattcagttgacccaggcccgagacactgctttgacctttccctgggccgaaggccccaatttggggagagatttccttggtcatgagcccctagggctgactgcttattctttctccttttcagatggatgagatcaaagggaaagaccgtgtgattctggccttggagaaggaacttggcgtgcaggctgggcagacccagaagctgcttctgcagaaagaggctttggatgagcagctggttcaggtcaaggaggccgagcggcaccacagtagtccaaagagagagctcccgcccgggatcggggacatggtggagctcatgggcgtccaggtgaggggcagcagcttgtgccagcctcaggctggtcccccacccatttaggtggcatttttctggtcagccacagaggactctgaggtagcatgtattcactcattcattcattcactcagtattggaggggatgttataagttctttgtgctggacgctgtgtgaggtgccggtgcgtggcggcctttgtaagagatacggggtgggaggggcctgaccacaagggccccagggagccacggaagggtttgaagtctcagtggccgtctagatggagtcttccgcaggtgtgcagtgggcttgggtgttccccaccttgctgtgtggcatgtgggcccctgaataaggatctcacccattatgtcatgtgaattttctaagaaggctccacacaacttcttcaaagtacatttacgtcttgacttttttttttttttttttttttttttttaggatcaacatatggacgagcgagatgtgaggcgatttcaactaaaaattgctgaactgaattcagtgatacggaagctggaagacagaaatacgctgttggcagatgagaggaatgaactggtaagtagccccaagagacaggcggtgcctcatagggtgcaaggaaggggccctgagtccctgaaacatgccctgcacagaaagttaatgcagaagccttctggttctctgaactttccttcttacttcttttcgattaaaaatctaacacatgctcattgaagaaatctcttactgccatttgtttttgtaggaacttatctttagcaaacaactggagaacttccatgagaagcatggagaggatgttcattgcagtgttgtttatgttaacaaccgaaaccgaaaaaaatcaacaattaaaaaaccaaaaaacccaattgttcaatactaaagcgtagggcagagtgattatggaatatttatacaatgaattctagactgtcattaagattgatgatggagaccctctttaattgaaatggaaacgtgttcatagtaaattaaatgaaaaatgcattttacagaacaataatacattgtcatcatcttgaatattagaaattattcttttttttttttttttgagataaagtttcactcttgtcgcccaggctggagtgcaattggcaccatcttggctcaccgtaaccttcacctcccgggttcaagcgattctcctgcctcagcctcccgagtagctgggattacaggcatgtgccaccatgcccggctaattttgtacatttagtagaggcagggtttctccatgttggccaggctggtcttgaactcctgacctcaggtgatctgcccgcctcagcctcccaaagtgctgggattacacacaagagccaccacatctggctagaagttattcttttaggtggtgtaattatgggtaattttaatttgtgcttatgtatttacttttttgcataaaattttatatacttgtaaactaaaacttatacattaattttaaaaataatgaacatggacttctggttaaaaaagaaatctccagtaaaaatagaaatttcatgaatatgtttacattttctggataacagcaaaactaatttttacgtaatggcagttgatacatcaacttcttgacagatgcctcataatttttatgtttattctaatttttattatgaagagaagtatatccacagaatatttgaaaaaaatgaggggtgaaaagtgtccgtaagtatcacctcttcacaactttaataggatcaaaataaatttacttccttccagtatttttaaatgtttttttttttttggctttaatcagactgtacatctaatattatgtctctactcttcatttaaatatttataagctcataaatactcatgagctgcatagtttactgagtggattaggaaaaaacacaggcttctggaaacatgtcagatcagactgaagtagttaaaagtagaaactaataagtttgccaacgcttcaatcttttttttttttttttgaggtggagtcttgctctgttgcccaggtttgagtgaggtgatgtgatctcagctcactgcaacctctgcctcccgggttcaagtgattctcctgcctcagcctcccaagtagctaggattacaggcacccgccaacacacccggctaatttttgtatttttagtagagatggggtttcaccatgttggccaggctggtcttgaactcctgacctcaagtgatccgcctgcctcagcttcccaaagtgctgggattacaggcgtgagccaccgcgcctggcctcaatcttaaaatcatgaggtaactactgctagtttggagtggttcttaaatgttcttaatgtttaaataaataccttaaaactcaccgagagactttgttttattttatggatatgaattgggatttttttccctgctgtgtattgttctgcaacttgcttttttcacctcattgatcaattacatcactccccatcagtgcttagagatctgtctttgtctttttaccagcggcttggtagtccattgtgtggatataccatggtctgttcacctctcttcccagtggtggatctttaggctgttgccgctttctggatttctgtgaggtgccacatgcctgtaatctcagcactttgggaagccaacgtgggaagattccttgagctcaggagttccagcccagcttgggcagcatggcaaaaccccatctctaaaaatacaaaaaaattagctgggtgcagtggtgcacacctgtagttccagctacttgggaggctgaggtgggagatcacttgagtccaggacgtcaaggctgcagtgagctgaaatcacgccacggcactcaagcctgggtgacgaagtgagaccctttgtcaaagtgacacatgtcattttacctaccttctgtctcgaaaaaaaaaaatgccatgtagaagatacatatgggtctttactgactttacataaaggttcaagtcagtaaagacacgtatgtatcttctacatggcatttttttgggggggcggtaggtttctagaagtagaatgcatgggtcacatggtacattttatatttcaacctataccatcagaatattttaccttaacatttacagcctggggagtaaacgcaggggtctagagtcagtcccttgtgtttgaatcttggtgaactcaaaccgccaatctttgcaaaagtgcaaagcattcttggcactttctttgtgaagttgggcccattgcctcctctctttgggctcaggttctttgtctataaaatgcggatggggaaggtggccccttcacatgtgttggctgtgcctgtggttatcatgatattgatagatatttaagttgtttctaattctttccatgaaaataacactgggagactaccactatgcattcaattctcaccatgtgcctaggagacaggagctgccgtgattctcatttgatagatgaggaaactgaggctgagaacttgcccattgtcatgcaactagcaaacaaatgtgtcatccaggacactggcctcagaaggggtcctaactgggttgagtctctgctcacctcggtgctgtgacctcggccgtccgtcgtcaagttgtctgagcctctgtgtctgtttccaaccacagctgaaacgctcacgagagaccgaggttcagctgaagcccctggtggagaagaacaagcggatgaacaagaagaatgaggatctgttgcagagtatccagaggatggaggagaaaatcaagaacctcacgcgggaaaacgtggaaatggtgagctgtggaccccttggggacagccctgacactcccttctctgtctgggattcttcagccctgaacctcccgattcacatgttctggggcgcacctgctgcccacctccccacaaagcaccaggcacagtgtcagtcacagatgtctcgcctttctctccacctgtctcacattcactgtgctgtgggtgtttgtgcccagagggagtcagacagctgtgtccttaaacacatcccccattctctctgagcctctgtttcttcatgcataaaatgggaatgaaaatatccacactggaggatcatcaagaggatgaaataacagcatgtaaagacctcacagggaacgggcccagaggacacccagcaagtgaaagctgttacaatgatcgctggcgatgctctgcagaggggtttctcctccagctaggatgcctggtgtttgtggtcagggcaggcgtcttgtagttgacagtttacagaatgatttcaggttcattgttcagagtagtatcaacccccactttacagccgggaagacggaggctctgtcaccacacatgctctgctgtctgcactgtagcagatgcaggtgtgtgtgtgtgtgtgtgtgtgtgtgtgtgtgtgtgtgtgtaattgctgttgtgtgaagtcctctccttcccctgccttcccctcccaggtttctaggctcatttcaaatgtcgtcttccacccccaggccctgcgcatcccttcctgtcagcagtgtgcatggtcagccccaccttgggcttggctttggtctgccctgtcccctcttccagcacaggacaaggtggccacgtattagtccattttcacactgctgataaaggcatacctgagactgggtaatttgtaaagaaaaagaggtttaatggactcacagtttcacgtggctggggaggcctcacaatcatggcagaaagctaaaggcacatcttacttggcagcagacaagacagactgagagccaagtaaaaggggaaaacccttataaaaacatcagagacttattcacaaccacgagaatagtatgagagaaaccgccaccatgattcaatgatctcccacctggcccctcccacaacacacgggagttctgggagccgcaattcaagatgagatttgggtggggacacagccaaaccatatcaggccatcatctctttcatcctcccatccatccttctgtccctgcacccctgagctccactccagcactgtccctaacaaacactgttggcgggtaaccctgtggtggtctgtctccctgtggctgcagaaagaaaagctgtcagcgcaggcgtctctgaagcggcatacctccttgaatgacctcagcctgacgagggatgagcaggagatcgagttcctgaggctgcaggtgctggagcagcagcacgtcattgacgacctctcactggtacatctagcacagctggcgcggctgcccctggcaggggtggcaccagctgacatgggtgtcaggaacgggtgttggggctcagggtgatgctgctgagctgggtcagggtcaggcagtgctgactttgggactcaccaagctcaccctggtgtgcacattcccgcttcattctgccactaagcagccttggcttaaatgagatcactggtacttggggacagtttccatggctacccttttctcacatcttctccctagcttgctgtgattgagaagcatcagttttaaggatgtcttttggcctttagagactgggcatgatctgttccagagaaggctttttgtttgtttggttggttggttggttggtttttagcttagcagttgcagactgtgagtttaggcccacaaacttgaaccttataaccagaccagcaccttgctaagactgcctgtgtgagttttggacgtgtatatggggcgtgcatctatcaaagggggttgagtatgtcctaagcggtggagaattgcatccagagaattccacagctctctgtgaaaggaacttcggcaacaggcagagaacacctgcagggagctttagttggatcttagaagtagaacgtgttctgctcaccaaagtgggtgtgtgatggttccatgcactggttttcaaagaatagaaaagctagtgatcaaaattctagaaaaggctttgattataattttcatgttcattttgcctgcctccatctccctctacctctttaacttctctctttcttcctttcacccatccatccatccatccatccacccacccatctgtccacccatccatccatccactcacccattctttcatccttccatccacttatctatgcatacatctatctatccatccatctttgcttcattacacaaaagactcaatgcagcttaggatgaaaaatatatttcagtgaaataacaataaagtcaaaaggtggataataaactctccctgtagctctcagttcagagaagcagccatcacttgggcacttagaacttcaactagccatgcctggtgcgggtgggcaggcccagctccctttgagagccagtggctttggtttgtgagatgtgaggctggctggaaatgccaaccgttgtgtttccttctaggagagagaacggctgttgcgctccaaaaggcatcgagggaaaagtctgaaaccgcccaaggtgagcctgcgatggtgcacctgccctaccttgccgctgtgtcacggatctgcagggcagatgggtcgtggagtggggaggttttacagaggggtcctgaagcagacacacacatctctgcatgcctgatgatgaaaagcctgtcatcaccgtctctcaaagcaacataaatatggccgtgtcatgtgacccagttattgtaatttattcatggaaaacttcctgatgtattctccacttaggcttcagggtatattcacccaaaattaaaaacataaatacttaaaccttttgaaggatttaagggacattcagggttggtttatatgagagcatatcctgttctaaaaaaatcaggagctttgtgtttttttggaatcatgcagaactgtagtcttttttggaaaatataggtcttttgctatttcctagtaacagtgtctgaaggagctgggcttataaaattcaaatgcccacagggaccaatctggaatgtaaagagcgcactggagctgataccaaaaaaaaaaaaaaaaagcatagtttgcctttaaacctgtaaacctatttttggctcccacaaagacacagttctcctctccatttttttttttgttttttttttttagacagagtctcactctgttgtccaggctggagtgcagtgacaccatctcggctcactgcaaactccaccacccaggtttaaatgattctcctgcctcagcctcccgagtagctgggactacaggcacatgccaccacgcccggctaaattttgtatttttagtagcggcagggtttcaccattttggctaggctggtcttctctcctttttattgaacacaagtgccccgtttggtttatcttttgatggagatgtggttatagagaaatatttctcatctataagggaaacagctgtgcaaatgtgatagtgaatggccaaagacatgtggtcttggtgtcagggtgacaacagggaatggtggggactgtggcaaactgggccctgaatcctggttgctataagaaggtggaccgatggcatcagatagtccagtttttcaagggaaatataaatccttgtatgttagcttcctagggctgccttaacaaagtaccacaaaatcagtggcttagagccaccgaaaaagaccgggcacagtggctcatgcctgtaattccagcactttgaaaggccagggtgggtggatcgcttgagcccaggagtttgagatcagcctgggcaacatagcaagaccctgtctctacaaaaaattaaaaaaattagctggatgtggtggcacctgaagtcccagctactttggaggctgaagcaggaggactgcttgagcccaggaggtcaaggctgtagtgagtcatgattttgccactgagctccagcctcagtgacagagcaagaccctgtctcaaaaaaaaaaaaaaaaaaaaaggaaaggaaatgtattatcttacagttctagaggccagaatgctgaaattaaggtgtcggtagagccacgttccctccctctaaaacccgtagcagacccctcctttcctcttcctagcttagagtggtttcccagcaatctttggtgtccttggtttgcagcttgaactccaatctctgccttcattgtcagtgacattctacctgtgtgtctctgtggcttcacatataaagccaccactcatgctggattaggagtccaccctactccaacgtgacctcatgataatttaactacatctgcaatgatcctatttccaaataagtcacattctgaggtactgggattaggacctcgacctatctttttggggggatacagtttaatccataacaccttactttatatgaaattgaaggatttaaatgctggattttaaatgtctgtaattttatatgtccaaatacaggttgaacatccgtaatccaaaatccaaaaatccgaaatccaaaatgctccaaaatctgaaactttctcagcaccaacatgaggccagggaaatttcacacctggcctcatgtgacaggttgcagtaaaaacactatcaaaactttgattcatgcacaaaattatttaaaatattatatacaattcccttcaggctatgtattatatataaagtgtatatgaaacaaatgaatttcatgtttagacttgggtcccatccccaagataccttattctgtttatgcaaatattccaaaatctgaaaaaacatccaaaattccttctggttccaagtatttcagataaaggacactcagcctgtaaaatatatacctgtgggccacataaaatatatctatgggtgcaatttggctcccaggctgcctcctggtggcctttactgcagcgttcaggtaatgccacttagagtggcctggctcattggtgatttgctaggtcctggattctcagatgagtgggtatttaaacaatctcattgaattctcacagccaccccatatagttggtattattttttcaattttacagctacagaagacatatatatatataatatagaaaaactcagagaaaaattaaattgacaaggctgagtttcaaactcaagtctgagactacaaggcccaagcttttcccaccaagccaagtcgaacacggggcaaatttctgcacattgacattagaaactcagaaataggaagtggtttgagtagaacttgtctatatttatttgtttgtttgtttattttattttttatttatttactaattttttttgagatggagtttcgctcttgttgcctgggctggagtgcaatggcacaatctcggctcattgcaacctctgcctcccaggttcaagcgattctcctgcctcagcctcccaagtagccgagattacaggcatgtgccaccacgcctggctaattttgtatttttagtagagacggggtttcaccatgttggccaggctgatctcaaactccagacctcaagtgatccacctgcctcagcctcccaaagtgctgggattacaggcatgagcaactgcaactggccattcttcctgatttctgaatgtgtttatgggaggagaaattcacaaagggttggaattgaatcgtgatttgctacattgcctgtacaacaggcaaggacaggggctgtgtctgtcctgcccactgtggcctgttcattgcctggcacagagtaggtgttgactaaatagtccctaaatagttgttggctaaataagcgaattgcctttactggaaaaatgtacttgtatgacactggattgttgcagaagaacggtgatgtgtggtcactttaatgaagatagttccgtgtcattaggaggccgaatttggggatctgtgtagaaactttcctgaatgggtttagggtcttttctattcactgtttcctgggcccaccagcattttttctttttctcaagattcagtgtagacttccgtgtggaccaagttttctcccatgttcctacttaatcctggcattgtgcagggctggattgaattgatacttggatccatcggggcccaagcaggttttgtaatccagggttgccttttaggcctaagaagcttctctttcttctctaccacaggccacaggcattcagtacacttggctttctgtatctgtgggtttcacatccatggattcaaccaacctctggttgaaaaccttcaggaaaaaaaaaatggatggttgcatctctactgaacatatacagactttttttccttttctttttgttttgagatggagtctcactctgttgaccaggctggagtgcagtggcacgctcttggctcactgcaacctccacctcccggacttttttttccttttcattattcactaaacaatacagtctaaaactagagtcatgcattccttaacaacagggacacattctgagaaatgcgtcattaggcgactttgtcatgcaaacatcatgaagtatacttgcacaaacccagatggtctagcctcctacacacctaggctattcagtctagcctgtggcttctgggctgcaagcctgtgccgcatgctactgtactgaatactgtaggcagttgtaatccaatggtatttgtgtatctaaacatagacaatgtacagtaaaaatacagtgttatgatcttatgggaccgttgttgtatactgttgaggactgagatgctgttatgctgcacataactgggtttacagggcatctgcactgtattaggtacgatattataagtaatctagttaaagtgtacaagaggatgtgcgtaggttatatgcaagcactacaccaatttgtataaggggcttgagcagccatggatttgagtattcgtgggaggttctagaaccagtcccccatgggtaccgcaggatgactagactagtttctttttcccctgaaatgcccccatcactctctgtccatcacacatggaagtgttttaacactttgccaaaggctttgcttgacagagtactgtggtgaatgcattgaaagttccagaactttccagaaatctgacagccccatccctactctccagctcctgactttctgtcagaaagaccctagcaaacctccctggactccctgcaggagggtgcctccagtccactcccacaccccagcttgcagaagatgcagtcagggcagagccttgcagaagatgcagtcagggcaaagcagagggtgtccacctttgtcttcccggagcgtttgtgtccctgagggccatgactctgccttactgggcctatccaacagtccccttatgggatctcctccagggacaagattggtgctgattatctcatttcccagggagcctgctggttcagcgtgggctcacgttagccccaaaggagaggttggaggagaaggatcctgagtggttcctcggactgtgccctggggactggggtagggggcttgctcaggacctgggcctctggccatgtggcagtaaattgtgttgcaggctattggaacttgcacagaagctgtatcatcacagagttctaagcatatgcataatggctaaaaatcagtacagtttacgcacacaccttggttgaaagaaggacccatcattttggataaggttgggaaattgtagccccaagcagtatgggagtcagaccctagctactagctggatgggattggccaagtcatctaaacgctcagaacctcagtttgattcttaaaatgaacattatatccatgggatctaaggaagcttctggttctttgcttggtgcatagcaggttatcaggaagtcagagtgtctccttcttcctttaccttatagctcaataactttcctttggagggcctgtgaaatgcagattcccaggccatgcctacaccctgcctcccccactaatttataatagtgaggtgggatctcaatgccctttgcagtaatcatcctttaagggagggctggggactgcgctgggaaccatcaaagcacattggaaggagaggccctttcttgggccagtgcttcagtgctgtgtcccctcctccccaaatgactctgggtctgctgttgccaggggttggaggatgcctgaggtctggcgggccatttttgtcagtggctcttgcatccattctgatgggacctatcaaaacacgcaggacctatctaaacttgactcctagccccacgcccctgaggccaagcctgctgcctgctggagggaaggacacccctgaggccaagcctgctgcctgctggagggaaggacagacactggcagctggttgtacagtacctttgcctgcctaggaagctcaagcacttttttttttttttttttttaagacagagtttctctctgtcgcccaggttggagtgtagtggcgtgatggagctcagctcacggcaacctccgcctcccgggttcaaccaattctcgtgcctcagcctcctgagtagctgggagtgtgccaccaggcctggctaattttttttgtatttttagtagagacagggtttcaccatattggccaggctggtctcgaactcctgacctcaagtgacctgcctgcctcggcctcccaaagtcaaacattttttcatcatgtgcatgcatttttcatttgcaagttttgccaaagctacccattttttccttcatggttgtttgcagtcgatcttattcctaggctgccttccccacggctgtcaccagtctgtgagctcatgagggctggatggtgccctgggatccagctactcgaagctgctggcacagtgccctgcactcagagaggctaatagtagtgactgcgtgaaaccagtggctacttcatgtctgtttacagggctggcctcggttggtgtgtaactgtgggccctttgctgggaggggcgagggcttgttcccttctggctcagcagtgtccctgtcacctggtccctcctccacagcagccatcaggactcatttcatgcagctctgatcaaaggtaaagagggcatgggcagcaggactttgtcccagcctcgccagctgagtggctgatgtaaatcaaaaagtctctgaggcagctctcaatcaatttagaagtttattttactaaggttaagaatgtaccctggagacagatctgagcctttctccaaagatgattttgaggggttcaatatttaaaggggaaaagcgggctggaggggaaagagggggtgtgtggtcacatgactgaatccacaggttgtgagagaaacggagcaggtaggggaatagtcctaattatgtaattgtcttgtgctcagtaaatcaacactttacataagataaggtgaacatggagcagctacctgtagagatgcttaaccttttctctgcagctctctgcttaggaacaaaaggaaaggcagcttcttgcatgactcagctttcagcttaagtttttctttttggtggagtgaactggggttcagagtttttattttcctttcacagcgggctctgtgccagaagcatgggaggcccctctgagcattgctccatgtcccacctgctgggggccctttggtaaaggactcggggaagatgtgggtcctggggataggacactggggtgattatgaagagacgggggctgtgtcctggaccacatgcaggcgtctcagcagacaagcacacacaccgtctgtgccggtcctggaggtaccgccagaggagctgcagctggtgtgggtagagcagagctcgggagcctgacctggccacagaggccgactgggtaccttgtccagggtagcaaacaccatggggacatccaactcccatttgcagacttgggaagggacaggtgccattacctatggtggttctaggtaatttgttcacacagggaaggaaaccccagcgccaggagtgagcagggtggtgagtcctggtctcagggagaagctgctgcagaggctgggtctgtaggtgcccggcctcctgcctagtttcaggaggtgacttcaggccccgtggggaggggcttgaggcaaaggttccagattgcagccccgcccctccaggcccctctgtctcaagtctgcactgcctggggccaggcccaggtgtctcaggtctgcactgcctggggccaggcccagctgtctcaggtctgcactgcctggggtcaggcccagctgtctcaggtctgcactacctggccgggtggtgcctcattaggaaacatggcttaaagggtagtcggcactaaattgagtagcacaatccagtcacacagttcatctgatggaaacttccaaaggaatacagcatcatgcattgttgaagttgaaacatacatgaactttgctatgtacatttcttttatgaattatccattgccctttaatattgctttggtatctgtcaaagttcagacgttttacttttttgtggtaaagtctgtccattttttctgcagcatgagagtttttgcttttgatattatgtctggtgacgcttctccgagagatggaagactctcagagacatcccttctgggcaggtgaatctgaagactttgatctagttaaaaaaatcagtttttctattaaataatggtttgttttggcctataaaaatggtaaaacgctgacaaattgatggtagagaagccagtgaatttggcaagtctagggtgcctatgaggttgtcggggaacagcagataaatttcccaaacacatgaggacagaggcagctcctcggtttgggtcctgagggagaatctatcgtggcgttgccattgctagtgctgccccgggggccttgcgattgtctggggacccagggcctgtgccatggtgttgacaacaggctctcggctcagggaggacgggatctgggaggaaggtccccagagaataaactggttcggaggctgtcctctgtgacgaaggcaccctatcccgcccctggaaacctctcccttcagcccgcggttggcgtggccagcatctgggctctgccctggagctggcttcccttttactgaaggtgcgtcttctggcgcactcctgttctcgggactctgcagcagacgggtccacaggaagccgtggagttgctagggcgggtgtgttagaggaaaggggagtgcgtggggagagaattggtgctttttccttggactggaggaagccctgaaaatggatgccgacgaggtggcttttgcctaagcccacgcacaggggctggtgtgtctgcagcttcacgccaccatggaatatgtcctctttgtgctgtacttctctttcttcctgtgtctctgtgccctggtgtgcctgtacttctctggctgccaggagatgacctataagcatgaaggtaggcagctggttcggggttttgcgttttgaggttctctggcggtccctggctgtggccgaccgatgctcctgcctgtgacaggtggctctgttgaaaatgataggaaggtgagaagacaggtggctgagagagactggatctggttggggggctatttgttttgggggtacctcctctttttccctctgcttcatctgacccgctgaggaagagcacctctgtatatgcaaagtgtaaatggaggagacatgtttactcttcattcattttgccaaaactgaatctttttttttttttttttgagacaggatcttgccctgtcacccaggctggagtgcagaggcacaatcacagctcactgcagccccaacctcccaggctcaagtaatctttccacctcagcctcccaagtagctgggactacaggcgtcagccaccatactcggctaactttttaaataactttttgtagagatggattctcactatgtggcccaggttgatcttgaactcctgggctcaagcgatctttctgcctcagcctcccaaagtgctgggattacaggcatgagccactgtgcccggccaaaactgaatcttaatctgaatctggattcatctgtagaaacgagtcaacaaggagaggctttggttgcaaggaacatggaaggctagaggaattacctttttattcagtagatgggctcagaatgagcaaatggtggacatttttgctcctaatgtatctcttgtgaggaaaaacctagagactcttagaagagtggagacacaaaaaaatgaagtttctttcatgtttgccattttttttaaagcccactgtgtgccagtcatgacaggaaacaatgttttctgggcggttctcccctcatctcttgagaagcaggtggtgaattatttcctgcattttttgaaaatgcagtgcaaaaccagttgcattgccttcaaggaagatagccactgtgtttttactttaaacattaatatattgtttctattttttattaataaagacacaaatatattgagaaatcgagtacatgtaggcttactgcataatataatcactcaacacaacttttctctaaaggaaacaaactaacccagtgttataaaatgttataaacactaacccagtgttataaaatgttataaaaaaatgttaaggctgggcatgatggctcatacctgtgatcccatcactttgggaggtcgaggtagacggatcacttgaggtcaagagtttgacaccagcctggctaacatggtgaaaccttgtcactacttaagaaaaatatatatgtacaaaaattagccagatgtggtggcacgcacctgtaatcccagctacttgggaggctgaagcagaagaatcgcttgaacttgggagacggaagttgtagtaagttgagattgcactactgctctccagcctgggcgacagaaggagattctgtctcaaaaaaaaaaaaaaaaagttaaaaaatttttaaaaatacccagcataaaaacctgaggggttgggtcccagacaactcgttgctgctatgggaactctgtgtgtgccgtgcctggctgtggattcctctgcattgctgcaggattcaaattggactgcccttttgtgtttggtttctgctctaagagctgcttcctctttccctcaaagcagcatagttctgtggagtcttggtctctggggccatatgatatgatactgtcgggggctccactgggtctggagttaggctgtttgctaaggttgctctactttaaacacaggcggcaacatcggtagttaatgccctgtattagggcttgggagttgagtccttaactagcagtcctgtagggttttcggcagcattggtagttaatgccctgtattagggcttgagagttgagtctttaactggtagtcctgcagagccttcacagtggatcgtcctaggtaattgagcattgagtcgttgcccccaggagggtccctgatgctgacgtggatggtcacagcccagcagtgtgttctaaatgtttggaaagtgtgtaacttgatgatgcttcctgggctacagcaacaaacagactcgtccccaaaggccttgcagttagcagtgtttacaagaaataaggtcagctcagtggctgttcagaaaaatgtggaacgtggagctcaggggggtgacctgcgtgtgcagaagagcttgagtgaacgtggagctcaggggggtgacctgcgtgtgcagaagagcttgagtgaacgtggagctcaggggggtgacctgcgtgtgcagaagagcttgagtgaacgtggagctcaggggggtgacctgtgtgtgcagaagagcttgagtgaacctggagctcagggggtgacctgtgtgtgtgtgtgcagaagagcttgagtgaacctggagctcaggggggtgacctgtgtgtgcagaagagcttgagtgaacctggagctcagggggtgacctgtgtgtgtgtgtgcagaagagcttgagtgaacctggagctcaggggggtgacctgtgtgtgcagaagagcttgagtgctgcagatgcatcactcccgtgggtgccattgtcaccatgggatgtcactaccactgctctctagagctggttggaagagtccatgatgcctgaagtcgggtggggttctcatccagaggggagatttgagtagatgattgtctccagcctctgcaaggagagaaatgacattgaagttgatggtgcccatagtcttcacgtacctgccaatgagactcatctggggcatgtaaccacatggtgcccaactgatgccagctgtgtgaatgaatggaaatggtgtcatgtgcaaaacaaaatctgtttgtggatagacaaactagtgtggctttgagttcattaacactgggatacagtcgagaacaaaagggccaaccccctgtcttcatggagcttccatttcaaggggtagggggaagaccatcagtaaacacaatagcttgccagatcttacgtcagcggggagatgtgctatggaaaggaataaagaaggaggccccagaggctggggcgggggtgaagcaggagggacctgggcatggtggccaggaagccttttctcatatggttgcatttgtgcagagacctaagggaatctagggaaggagacatgtggattctggggaagagcgtctcggagcgcaaaggccccatggcaggtgtgtgtggggtgcagaagcctggagcggaggaggagagggagggatgatgccagggcaggatgggaggtggatcctgtagggcctcgcagaccacttgtagcctgcctggatgttggtggttttaataattccagagagagagatattggtggctgggaccaagatgaaggtcccaatggagagagggggagagagggctggattttgagttgaaggtgaagacaacagggtttctcccagggagggcaggcatgagaggtggagaagacaggggaggactcctgggattggggcctgggcaactgaagcatgagctgctgctgctggactcaggttagattgcgggaggtgcggtgttgggggtaagtcactgcccgctaggattccacaatgccataaaggacgcagctgacgtatgagtctggagttcgggggagagtcgtattccccatgcatattaaaaagcaaggaggaatgtgggaggggtgatgcagtgagcagaaagacaggtgccaaatgcaagaacgttctgggtgacgtgtggtggtgggtgcctcccttgcagcaccttcagaaactgtgtaaggtgacaagggtgtccctgcatcttcttccttgccttatgtctgaattatttcctaatcacattattaactctggtgccagtcacatttttctcacatttacagatatctgggtaaaacactcaggctgggaggggcccttagtatgtggggagtgcctgggttttctctgtgggttgggggagctctgggtgaagtcatgttttggatgagccagcagagccttgggctgggctctggaattcagttttgattcattcttcatggtctgaaaggcattcattgattgtaaaaacaaataaaaatccttgtcgggggctgtttgggaaaaaaaaacccaaaaaagctatgttcctaaaataagagacattgatctggtgattgtgggttgaggtctgtagcccctaggggatgcaagctccttggggcagggacctggcctggttatgatcctattgtattccccaggcctgccccgtgtctggcccatagaaggagctttgccagtgttttctgagtgaatgaattgatagacagatgaatgaagccccatatcctatgatatttggagtgggagaagtgccagcagggcaactcagaggccgtcacatagagccttacaatttgcctctggatctgagtgatggtcgtgtgaaggtctattacatgattccttctcattctgtgaatcttcccagttttctataataaaaagttaagcagagattgcctctaagtgtgggtctggccaggacttgggccacacatttgccacactagtcagagtactaggactatggctgggctctccactccttcaagctgttgccccctctgctgtccttattcatccagttcttctccttagaactgagcatctccctggaccctgtcccccttctccttggtacagccagtgcgctgctcatggagcgtgacggagtgctgggctgctttctgggcacagggcatgcatggcccccttttgtgctcacaggtgaggtggcttctcaatccatttgctagagaaggaggctggtgctccaggggccaagtggtttgcacaggtctacagctggagagccagagccaggaccagggccagactagctcgctcaggctgtaaaccctagggtcatccgccacctgctgccaccttttatcccacccagtcagttacgaagcccaccaaccgcatcttgtgatgccccagtggcccaaatgtcaatcatcacccccctgcactggcatgcccacgaccagggactggtagactctggcaatcctcagtcgttgctaacatcatacaaattgcgttttacagaagcatgttgtggagacattttttggatttgatgaggagtctgtggactcagaaacgttgtccgaaacatcctacaacacagacaggacagacaggaccccagccacgcccgaagaagacttggacgatgtaagcaaacctgcagagagggcgggacctcaccccagatgctctcggggcggcacctcctgcttttgatagttgcaagtttcgctcccttgcctatagttctgaaccccagatgaccagttcctaccagtgcattatcaaagccaatggtgtgaagggaaggcgggccccacagctgtgggctccatgaatggcgatgggagggcagcacgtggggaccctttctttccccagcactgatttccccaccaaggaaatctgtggctgccaagttcaagctgagtcattgagggatgttgccttgggtttcctcaccatttgcaattaaaactgctgcgtaatggtctctccctggtccccacgcatgtgtgcacacacggacacaccaccgggcagaaacagcatcattgctttcttgactaagataaagcatgtaatccaaaaatatataaagaagaaggtgaagagccctgaagtcccatcaccccaaggtcaccgcctcaccctgtcctgaccacctgtgcccatctgggtgcatagccagcttcttgagcaaggtggattcgtgagggggcaaagaccagcttcgttctcactcaccttccccaggtgaattctttcaggagtgctgattacatctcaggcagaccttgtgggcttctatgccttccagtgatgggaataatcacatttgattaatttcctaaacagcagacttcattcagcgcagaccttccccttgctccccaccagggcctgcgtcaggcttggctgctgtttccctaccttgctcttctgcctcttcccatgcaggcccctggtggctttttctgagcccagggaagagcaagagtgggaagggggtgcggatatgccggggcagctggccctcagggcagtgccctccggcaggggcaggtggatcgcgctacctcgcgagggagcacttctccaggtctccacaagctccccttgctgtgctgcaccccacagcttcctggtgagggactgggcactgcagctccttgcgcccccacatcccgagtctctgaatggtccgcctcccacacacccctgcttgttgtccttgtcccctcctggtggcattttctgtggagtcccatctggaatgacttctaggctggtttcctcccatgggtctatttgccataggaaaatgtggcacatgctataggcgctggcacattcaaccccaaggtggccctctctttgctcttccatcttgtgccaaaactctaggggacacatgtcacctctgcaggtcgtcccctggacatcctttctcacactgggagagacacaccatcctccccgtcagcccaccagcctcagcccaagtgccggctggagggaggggccaggccagtgctggaggcacacaacagtccatcagcctgtcctgcacaggggtctggactaggctactcaggctttagggtcttgttctcagccatgggccttttatgtttaacttaaaacaggatgcgtgattttcagtttgctttttcccagccagtgatatgtaataggcatctttcagcaccagaacatgggattgcctcatcctctctcatggccatgtggggctttcccatggatgagcagcacgcactgatgagggatttatgctgtgtcgttttccacacctgtgaaccatgcatggagctccttcgtatttgtgtctttacacacttatgtggccatttttttttttttggagacggagtctagctctgtcgcccaggctagagtgcggtggcatgatctcggcttactgcaacctccacctcccaggctcaaggaattctcctgcctcagcctcccgagtagctggaattacaggtgcccaccaccataaccagctaatttttgtattttagtagagatggagttttgccatgttggccaggctagtctcaaactcctgacctcaggtgatctgcctcagcctcccaaagtgctgggattacaggcgtgagccaccatgcccggccatctctttaggataaattcccagaatgggaggtgctcagtgggaggggacaccctttacaatggagacctttgcttctggagttggggctggttccatggtaccagccctttctctcccacctgctcccacataactcaagtgattcctgtgggtgggagctcctgggaggagtgctgatggctgaggaggtgcctcctcctggcagccctttcctccaatgccctagttgcttcctggcaatgcgaggctccttaagcacctgttggcagcactgtgagatgtggtcgtttgatgtctaagttgaccctggcactcaaagccatagcaagtgtttatttatgtttattattaaaatcaatcataaatcatttattattgtaattttgcacttgattatttgttttcttctccattatgtgaaggccacagcccgagaggaggctgacctgcgcttctgccagctgacccgggagtaccaggccctgcaacgcgcctacgccctgctccaggagcaggtgggaggcacgctggacgctgagagggaggcccgggtgagtgcagccagcctcagggctcgagggaggggccgaaggccaggtcatgtaggtcctttccagaagtgtgacataccctggcttggacactcagaggggattctgagaggtggtggggaacccatagcaaggtctctgctgtggtgacattctagatccctctctgcatcctcggtgtgatggcaggcgctctggaacattgagctgttagaggaagcaacgctacatatcacctgtgccgtctgtttggaggagagcatgtgttcagaatttaacactaagtgatgaaatcacagacttggctggcttgcaggcttcaggctccgctccctccagggctgccagccccccgccctccaggacatccaccagaacacttgcagggactctcagggtgctccccagccaccaaggcactctgggccctgtgaccacctcagtccaggccacgccattcctcaggctaggctgagctctgccttctggaaacttccatccactggcccttctcccaccttcgggagtcacatagactggggcctgctctcgcttcctcctgggagtgtggaggactcccggagagcacacacgggtgcttccctgcatcccctcccccatctcacccccacactggccccctgaagcaggaggaattaacccgatcttccgaatgaggaaacaggctcagaactgagcaacttgcccccaaatacccagatgatgctgaacagagctgggagtcgaggccaggtttctcggactcagggcctgtgctctttctcagagccctgtttgggaattccacaaatggatggattttggtagtcttaaaggcgatgggccagaatggggcattgcctggcaaatctgatggcaaaggcagagaggagaggccacgcccacgtggagtttgttccaggggcagcagtggccctgtagcggggagccaggagtaagggggagtgaggtcagcagggagggaagctgcttgtcccaccataaaaggcccagtctttgtcatctaggtcagaggagggaaactgtgaggctttgtgtgggctgaataatttttgtttcgctttttaaatttcatctacttgccaacatttaaaaatcaagagattctatagagaaatccaggttcctgacctctcttgaaaggtcagaacatctggcagcaacaggcgtcccatttcttgtggctgctgctgggtagcagtgtctccctgagatgggacgtgtgcctctggcttgccacagtccccaccactccctgttaccccacacccagttgacttcccttatttatatgactttcttggtgcttgaagtattttgctttgcagctcctgctgcaggtgataaggggcctgggccaggggctatgcaattgtgccagcgtgttgaagtctgatgatggctgaatgagcttcaggttcagtaaggattggacttggtcagagagctgggcctgggcccccagtgtggctggcttctggctcactcacccccttcaaaaacagggtcccttctccaggcttcattttccttgcctgtaaagccaagcaagttttggtttgtaaaaccaaacaaggctgttctcttcttaatgatttttgtgtttgaagctgagccatgcttctagtaggccaaggttgaatacgtgctcctaaaagtgaacctgttcctaaggtttgcctataaggaccctaggcattgcttgcattggggcatgacgctttccgcttccctgtcacccattggaggtgacctgctcactgcctggtcttttcccttccagactcgggagcagctacaagctgatctgctgaggtgtcaggccaaaatcgaagatttggagaagttactggttgagaagggacaggtgagcaggagtgatctgtgctctgtgaatcttagcctttctgtccccttggtggtatccctggggctcgcccttgtgccaagggggacattctgtggggctggatcaggagctccagagacgctagaggaaaaaacactagcagaacccaggcacgaatgtgctccctactgtacctgtgtgccgagttaaaaaatcaaaacaaggtatggcattctaacttggctttttctttgtttgtttgccaaatgcacaaaaaagaggtaattccaaaagcaaaggtgtgatcaaagctgtttttgacttgaacctgaagaagagctgtcattttctatcaagattttaattgtgaaaatgaaccagcacccatgactaaccctgggttattgcagaggccccacctctggcctctgtgtcttagaacagtctggtcctgtgctgctcaggttagagtcaactgcacctacccatccactgcatttgattaggcaaggctggttgacagtgagacacagcagaaaagcaatgcctgggcctagacctgtcccctggagtgggggagccagagagggctctgggtggaaatctggcctctcggggtggcatgcgaaggttcgtatgggtcggcctcctctgtgtcagaagtgctgctgtggtgacataacctgaacgtctccctggctccatgtgacaaggtgtattctgttcacactcctgtttctcccaagggcctctcagggattcagggaggggggcaccaccatcttggaactgccccatctcgaacttttcctctgcttggctgtttgctgcctcagcaaaattcatcagtcacgtggccccactaacagtgagggtgccaaggagggtgtgggcagacggagtgtctggtggcccccacccctgcctgcagagaggcatctatggggggctgaggaggccaggcaaggtctaccacagttcctaggcctggtgggatacagtgggaggaggcgggtgtgaagcaaggggtgtaagaggttccaggcggcttaacagaagcagctccagaagagcactgcaaagctgcaaagctgcaaagctggcagctcagaatggctgccgcagggctcggggttgagactgaggttcccatggaggcggacggccagcgaccagcatgcatgcctggcacagagcaggtcaccacagcagactttaccaatggactgcgtgggggaatgtgagtgcccagccctctggaatggcttctctaaactgtggtctgcatcctccatgcggtgggatcgtgacgcagagctcacatgctatagctggccacctgggtcagagggcagctctgccacttccttgttgcataaccttgggcaagtaacataatctctttgtgcctccgtttcctcatctttaaaatggggctaataataatacctaacacattaagcaggaggacagaggagaacccaggagtagctggggcagaaatccaggtgcgagatgataaggcttttttgttttttgaggctgctagcctcagtttccctcttccaggctgagcccacatatctgtaacttgcctgatcacagtctataactaacttagtgttgtaagtaaatgcttattccttggcactgcaaggaaaaattagcattcagacaaaaagttttctcagcaaggcaattttcctttctgcagaaagggtgctgcctgtcagcagtcctgccacgagagcacattgagcaaagaaaagcagggatatttattccttatgcattggttccttactgctgtgtcctgtctccattggctggaactggacctcccagtctaagctagacccaattgactaataacttaaaacttttctagataggtaaaggtaatagagaacaaagggaaagaggaagttgctttcgaaaagacttagagaagtaataacatttccaaataaggaagggacataagctgcgagctgggacatgcttgagcaagtctataacaaatatcttggttaaagtacaaagacatagaatgtacttattcccttatatctaacagctacataggaggggcttaacaaagagttgttagtataaaggcaaggaggcttgaaggaagttagtttttaaaaagaaactattatttttaacacttatgatttattctttcataagaagggaaactttgaagaggaacttttctacttgccacacttagcctcccccaggggggtaggtcctctctgtgtggcctgctctgccctccatgcctgctggaggatggcacctgtctgaggctgagcctgtgtccattcatccagcaagcacttcccagaactctcacctatcccaggcccagtgctggtacctgggacgctgaatcagtttgctgttgctgagtaacaaaccaccccaatacttagttatttagaacagcaggggttctatttgcacacagttctgtggatcagcagtttgggctgggctcaggctgggcacagactgccagctcccggccaggtgcctccacctcagggaggcccacctggcttctttccccatggtttgggggcaagcccaaggcccaaggatggtccaaacctctgctcaggtcacctctgctaacatcccagtagccagagcatggcatggcccagcccagctttgaggttgaagaaatggaccccatcacctgctgggaggagctgccaagtcacatggcagagggggtgcacacagaggtgggagggagtgttgcagccatttttggccacaatatgccacagacaaaaggtgggtggagcacagccactcctcacaggtgctcgcagcctggtgaggcccacacatggatcagcatgaggatgatgcaggtgccaggtgccagggagacagaagcctggaggcaaccagggcctcttctgtgcattccatgtgcttgggaccagaccctaggccgggcctctgcttctcagcatcctagaacaacaagactcagtgagcccggcccagcctggtgcttgggaggggcctcagcccagccccagctctgtggctgaccagcagagaagggaggagggagttggagagggcttcccatgcgtttacttattccttcatccatccattccgggattcacagagtccccctgtccccatgtgacaggcactgtgccaggctcagggtgccacagcgacaagacggacttggtgccgtgtgctcacaggacttatgcaagaggatacgaccaggcaaagaaacgtgggaagggcatcgcaggcagagagagtggaatgaacaaaagcatgtcagtgtggctctggccagtctgcggggtatgaggtcagccttccgcatgcgtggagggtctgccagtgtggaccagtcaccctggaggcatgtttctgttaattagacggacagaatggagtcattgtgcttttgggaatgtgaacgaagtggagaagggatgccccacaaaccagccgtttctctttttggggtttaaaagtggacagggacaatgagggcacatcacggctgtcattttttatgacctttccatggtcagtttcatagaaagtgacctttctcactaaaagtttgttacttgaccatctgtttgcttccatgaatgtgaccatatttagtacttttccttaggattccaagtgggttgaagagaagcagctgctcatcagaacaaaccaagacttgctggaaaaggtgcgtgaccccacctcagggaagcacacagccgcagggcagttgggaccccgcgggcctgctcagactacacgggtcgtgcccagcgccatttgggcactccagtgaccagggcctcgggtcctgcacacctcccatgaggagagatgtcttcctcacatggaatcaaagccacatctgtggttctatcctctgggaccaggtctgcagagctggtttaggtcatcctccttgggtactccacagaaatggagaggcctggcctgtcttcccaggccactctgcagaaatggggagggctggccccaacctctggggataccctgcagaaatagggagagctgccctgtcctctggggacacctgcagaaatggggagggctgccccaacctctgggacccctgcagaaatggggagggctggccatgtcctctggggacaccctgcagaaatggggagggcaggttctctcctctggggacaccctggagaaatggggaggacaggtcccaacctctgcagacaccctgcagagatggggagagcttccttgttctctaaggacaccctgcagaaatggggagggctgccccgacctctagggacactctgcagaaatggggagggcagccctgtcctctggggacaccctgcagaaatgaggagggctgccccgacctctggggataccctgcagagatggggagggctggcctgtcctctggggacacactgcagaaattgggagagctgccccgacctctggggacactctgcagaaatggggagggcagccctgtcctctggggacactctgcagaaataaggagggctgccccgacctctggggataccctgcagagatggggagggctggcctgtcctctggggacacactgcagaaattgggagagctgccctgtcctttggggataccctgcagaaatggggagggctggcccgacctctggggacacctgcagaaatggggagggctgtccctgacctctggggacaactgaagaaatggggagggctggcctattgttgggctggtccatcttcctgacactgggctccaggccgcctctgctgtggctttatggtccagagcccttcaaccaccagtgtggtgggcgcctgaggcaggtccatgggcagatcctcaggccatctcagcccagtgcagctgacccataatgggaactgggcctctgttcttctctttctggttgtggaactttccagagctctcggagagtctgcttggcgagtagctctaatgctttggaattaaaatcgtagcttattttttccttattggtgtacaattcacttattctttttgtaaatctactgtgttgcacaaccatcaccgcaatgcagttttggaacatgatcagcctgataaagacccctcctgcccatgtgcagtcccccctctgccctgcctcccggcccctggcagcctccagtccactgtctctggatgttgcaagtaagtgcagccagaccctaggttaggcctcagcttttaagcatcctggggcaccaggactggaggaacctggcctggccctggtgggggtccttggcccagcccccaatctgctgctaaccagcatgtggccccattcccttccctgcatttctcaagggcatttgggacaagggcatttgggacagcgagcaaccccaggcctcgggagaattttagcatctttggtgtcttgttcactaaatccagggagccgcagaaaaccctcaccccctcatcccatttctaaaggtctcccgggggtgggatcacctggcagagggcccccctctagccttctgtaatggtgctatgaggctttactcaaagccctcgtgtacatgcgttattttagtgacttctcgctgctgccaggcgatgggtgctgctgtttcccttcttggacagaaggtgagggctggagtagtgggctgagtgatccagcgtctcccagctgggtctgggatgcaggcggtgtcacttcccacactgatctgcgctctcagagaactcctgcctttacggcttcttctgcaagctctgtggggaagcaggaggggccctccctgccgcagctggctgggcctctgtctgggtgggttgaatctggtggggcttgagttggaaagacctggacaggctttgggtgtggcactcttgcttcccagtgtttggcctcaaggaagggacttcatagcttcatgcctcagtctccccatcattcatttattcagcaaatatgtaagtagcccctactccactgggccaggctcggaggtgcaggggtgaacctggcccagcctctgtctccttcatttccagccgcatcagcaaaaaggacctgcagcacctacctcattcgtttgcttgctgcaaaccctgccctctcctgccccttgcctccgtggccagtcgtctgtttccctccagccactcagtcaggtggcctgtgaccaggggaccccagtgctcccacccatcctgttaatccgcaggtatctttgctctagatttacagactggaaatggaagagaaccagctgaagaatgaaatgcaagacgccaaggatcagaacgagctgttagaattcagagtgctagaactcgaagtaagagactctatctgttgtaaactctcaaacggagcagacattctctttgaacccaaactgaaattcatgtaaagctctcagatgttttcaagcatgtgtaaaggggacatgttatagtttctttctttctttctttctttttttttttaaatctgtatgttcagaataatttcactgccttaatgtgttctggagagcgtgctcacccaagtctatggacatgtaccagagctaatatatttattgcctatggcttgttttgcacttaataaaataatttgtttttgcaatattttgccttttttatttgtgtttcatttccataactacttctttcctgcatgcgtagtcaccgggtacgcattctgcacacccagacggaagcactgttgcaattaataacacacctttttaagtgatcttgcatgcagtaaatctcaccttttgaaatagcagagtctgacctgagccagcaattgactctagaatgtgtttaatgccagtttgggcccattttctatttgccaaggtaaacacaaggtaagtaaagacagggtagaaggatgtatttgcataggcgtttaagaaaactagttacgttgttcaaactcttttatccagtaaatacagacccaggcattgcagcaatattggactaaagaaattactatttgcaactcaaactgcacctcaaaactactggagggagatcagttgctgttcacatgtagaaatcctgttccttcaggaactgccccaatgcaccgagtgagattcagtgaaagaatactaatggtcttactgcttccagctgaaatcttacctcgggtgtgttactgtattgccttgctctcatggtacttcataatccttttttttgtttctgttgaaaaatcattggcattttaaacatcacttaagtttgtgatgagtttctctaagcacctgtagtggcgcagctctgctgtctctcagctgaaacctttgcatgcgtgaaaccctcaaagtgagcaccttcacagtgtctgtggcttccccaattttgttttctcctgccggcttgagttacaattctgtctgcattagaactgaccgtgtgtaccttgtcgtgtgggcagggacctgtggcctgagtatttctcacaccaagagtgactcagctcttggctcagcatgacatgagcattttatttgtgcgacagaattggaagttatgtgaggtcattgttaatactcctgccgctgttagagaacctttcacaaatccttgttatgagtctttctcatgagaattctataagcactacccagtttactagagttttctttaatggtctccaccatccttcagaaccaccagaaacaaaatggcttttttttttttttttttttttttaggacagagtctcgctctgtcacccaggctggaggacagtggcgtggtgcactcttggctcactgcaacctctgcctcccgagtgtgagtgattctccggcctcaacctccctagtagctgggatcacaggcacacacctcctcacccagctaatttttgtatttttagtagacacaggtttcgccatgttggccaggctggtctcaaactcctgacctcaagggatccacctgcctcagcctcccaaagtgctgggattacaggtataagctaccatgcccggcctacaaaatgacttttgttcatataaaatctgagttttgggggccactttttctatggggacgccatttaagtaaatttgctggtagaaagtcatctgtggaatggaaccatcatgaaatttgtttttttgcttgttttttttttattttatttttttaaattttggctaataagggaaataaggttttcttactagactgtttcaaacctaggttagtcaggttagggcttcatggaaattgattgaattagtgcccagccctccctctttccttcagtctcaccccagagcatcttcttaagccctgccatctagattcgtgcctctcttggctacatctcttagtagaattattcaagaagcccattggttctgtagctagattctgctagaatggcccaaagcatgttattttttaccttaccgtaactctgctcaaactaaagcagtttgatttaaaggtgtaatttgaaaaggtcttctctgctgccccaccatgacaaatctgtccatcgctaaagtgtttaaagtccattctgtgcaggaaacacatctgagacctgagtcctgttctgccactgtgctttagccctgtaagtaattaggttttcccgaccttttaaaaccttgtcatttatgtatgattaataaatacctcttctgggaaaaggcttgctcttcttcctcccttagtaattaattgagctttgctgtaagtctaaggcaggggtagaatgatcacttgttgtgttagtgtggctcagaaaacaattgtgaatggtattggcagattgtattggaaagaacagaaagtcagcctttggggccgggcgaggtggcttacgcctgtaatcccagcactttgggaggccgaggcgggtggatcacctgaggtctctggagttcaagaccagcctggccaacatggtgaaaccccgtctctactaaaaaagaaacaaaatctaaatacaaaattagcccggtgtggtggcgcgtgcctgtaatcccagctacttgggaggctgaggcaggagaatcacttgaacccgggaggtggaggttgcagtgagccaagattgtgccattgcactccagcctgggcgacaagaacagaacaccctctcaaaaaaaaaaaaaaaaggaaagaaaaagaaagaaagtcagcctttggggtcctggccctgccgcttgctagcgtgggacctcagacacagcctccctgggccaccaccttctctttgtctacagaatgaaagcaatgagcctgcctcctggggtagtgtgaggattagacgggagagtggtgtgcctggcacagagtaataaaccatagttggtggcttttgctgtctattcaaatttagtgcaactgtgttttttaaattttgtaattctgtgatttcctgggttttgatctcacaatggataaagccacggtaccctgttaaccatttctccctagatgaatagggaagaagtaaacacatttccatggagaactgctgcgtgggaaggcgtgaaaacgtcgtagctcacggacgaggctgcttctagtccgaactcgtgctttttagtaacgtctgtgcccactggaattccttggtttttgctgagtaacgtgggaaaatggcaagtggtaaataatccggtcacattctgtttttaaaccgaatcttttccccaggagagagagaggaggtcgccagcatttaacctccaaatcaccaccttccccgagaaccacagcagcgctctccagctgttctgtcaccaggaaggagttaaggtagcgtgcctggggggtgcctctgctgaatgccagccaagggctcgctcagtgcccggctcagctgcaaagggggagtgctgggatagaattgattttcatgagataccccttgtgttgaaagtcacagtttgtccatttattaaagggtcaccaaatgtgactctattttgacccatatgtttaaaacagcagaggcttggtgtatagccctgagtgtgaaccccagttccaccactgctctggcctgtaaactttcagagccttagcctcttcgctatgaaatccaaatgacaatacccacaccgtgaagctggggtgatgacacatcatgaacagactccaagtgcctggccctctgcctggcatgcagcaaggttctgtagatggtggctgtggttgctagaagggcccggggtttaccgtgtcctagagccctgctcagctccagggacagcgtcctgactcacccgcttccatggcctttctagaaagcagtgtttgtgctggtgtaacactcagcaaatgagcagcagttatgccttctctccctcactccccagaggaacggctgggcgcaaaacttggccagaaaagaaaagaaagagcgcggtgtcttgtccagaggaaaggccgtggccctagaaattggtatggttggtctctgtagctcacacaaaaatgaacgttggaaatctcttccaggatgtgaatgtttctgaacttatgaagaaattagatatccttggcgataacggggtaactatgagcgatcggtttctgctttcgtgttcttgttttgatctgggtgtattctgtgtgacttttgttttgttttgtttttaatttctctctgatgtaagagatctaagaagtacaatgtaaggcttttgtatggccgtgttcctgtgtgggtggtggggttggcattcgtcagaagtggggttccgaagttagattcccctggcctgttgagtgaggaggggacgggaaagcctcagaatccctacccagaatgcaggtggagtcacacgagattgctgaaatcagaaagggatctttttgccgtcctgaaagatgagcttgcatgtagccatgtttcacaaaagcttagtgccactctgtgaaatgtccccaaccagagggacaggagctgtctgcctgaggcgctggccccattagcgagagggagctgaccctcgggtgcagctcagagagaagctaggaaagtcgcttggtgttggcggggcatggtggctcacgcctgtaatcccagcactttggaaggctgaggctggcggatcacctgaggtcaggagttcgagaccagcctggccaacatggcgaaaccctgtctctgctaaaaatacaaaaactatccaggtgtggtggtgtgcatcccagctgctgtaatcccagctactcgggaggctgaggcaagagaatcacttgaacccaggaggcagaggttacagtgagccgagatcacaccactgcactcaaacccaggtgacagagagagactccgtctcaaaacaaacaaacataataaaacaaacaacaacaacgaaaaaaaaaaacttgcttggtgctgactgtctgcacgtggatttgggatccagtgtcaaatgcccttgcccatttttgtgttttagaatttgagaaatgaagaacaggttgcaataatccaagctggaactgtgcttgccctgtgtgaaaaggtagaagccagcggcatttctgtgctcacaccttgtcccagcttcccagcaccatacaagaaactgtacattggcgtcttgctttgcgtgggagcatgcgttccagtccgtctgcgtctgcacgtgcacatgcatgcctttccgttctcttcatgacggaagtcccacatgctcactgtagaaaacccagagacgcaggaggaaatcaaaacccggtggaggaaacagtctgtcacttttgtgtatttccttccagtggtttccctgcgtccattgtttttaaacttagttgaaatgatacttgacatccagttttccatcaggctttagaaacatcctccataccatttaacatggttcataaacgtgtttaaatggctgtgcatctctccatcacacagttatactgttagttacttcagcccctcttagctgttatatatttctttctaccatcatgcagtggtaaactgcacattttttacacataaatttctatctacgtcttaaaatatgcccataagatatattttagaagcagaatgactgggccaaatagtaagaatgtcttgaaggactacggcattgtcaaaacagtgtccagaaaagcggcaccagataccctcctacctgcagccttacacgttgttgatttatgcttgacatggcatgttaccgctgaaaagaactttgcccatttgatggtgaaaaccgtatcacgtcattgttttaatttttatttcagtgctagtgatactgagttttttatgtgtattatctattttcttctccttccttgtgaattgtaattgcatttattttgagggttttccattggatttgttcacccatccatccattcattcatttgacaaatatgtattcattgtcattgtctttcttactgacttctctgagtgctttacatattaaaaatactaactttttgacctgtttgttacaaaacacattcctgatttgtttgccttttacactggtttatggtgtgttagaaatatacaactgtttgtggctaaagaccttttcctttcaaagcatatgggttcaactttaaaatgctatttttgcagtgatgaggtcttaatgatcttagttgggattctttccagaattgctggaagggcatttaaaatagaaatagtttccttcccagggcatctgttcaatccctcaatcaagtaaaggatactaaatgttggtaacaagacttatggccaaaccttgcccaaggtcacactggtaggcagtgagaggattggaactcagctttctcctgttcctatcatcactaaacctggctgagcttgtgtcttctggtgaaccgcgggacggggatgactcacacctggccggctggtggctatcaggtgcaggtgcaggcacggggcggggcacatggggcatattcagcaccttcctttccagcagcaaaaccctccgtggctgcctaggctcctccaacagtgctccgtgtagtcacacaaagtgctgattaaacacttatgactcagcttattcaacatctactggaatatttactgagaaagagcatcttagtgtcaagtgctgagcacggccctgggagacgtggagatgtcacatccaccagtgtccgctttgatgtcggggaggcctctcctggcttgcgtcttggctacaccacgtgccagctgcaggggtttcagccggtttctcaccacatctctctcagccatgacactgagcatcctggtggctcacagtgtctgtcggaatccaggaggctgcatatttcagtgggatcaggcattgccatcaggttcaatcaagcacctggggccatgcttgcttcctggagatgcttggtcaatgcctgtggaccgggtgagcaaggagcaggaacctgctggtgactcagggtggctggttcgtcctggggctggggcagggggtgttggagggccagggcgccagctggcaggaggctttcagcctcagtgatagcagccctctgcagggcgctgagttctcccacctgagccgttcctgatgtacccctccccacgcccgacccacagcaggtgttccaggcctgcaccttaggtccccagcgctcctcatcctctgggcatctgtgagattagcagccctctaggacagctgaggaggtggaacctgtctgggatccggccactgtctgccttgaccctcaccatgctctgctcgcctggcagctgcccacctccccgcttgcaccctgcccacccccactgccgcccgcctgcccctgaccaccaacctccccaagctggtcagcctggtgctgtgccttgtgccctacgtgctagagagctgtgccagtcgccctagcctgccaggccctcacaacccctactgacggttatggggccccgattctgagcctggcacagaggtgcccagctccgcgtctttgaggaatagacttaaaccagagttttctcaggttgggttctaggagacactggccctgccatttgtctgtggataaaggtccagtaagcttgggtgttgccgctcgtctcctcccagcttggagaggatgttggtgtaagagctcctcaggtccagaagtggaccttcatgtggggtgggaactgcatcagcaggaccccctgagaacctggcaggaccactaggggactgacagtctgctttgcctgggactgacagctttcctgggacgtgagaattgcagtgctaaaacagggacagtcgtgggccaacagggacaagctggtcaccctagagccgacaggcactgcagggaagtttgcaaagggggtgagcacctgcaatgtcactgccagggaaggcttgctgacaggccccagttaacccctgctccactaaatactctttattttaaaaattgtcattccatacgggtatccgaataagtggaagtcaatgtcaatgttcccttagaggcattaatttttttttttgagacagagtctcactctgtcacccaggctggagtgcagtggcacgatctcagcttactgcaacctccacctcccaggttcaagtgattctcgtgcttcagcctcctgcagctgggattataggcatatgccgccacgtccggctaatttttgtatttttagtagagacgggtttctccatgttggttaggctggtctcaaactcctgacctcaagtgatctacccgccttggcctcccaaagtgctgggattacaggtatgagacacctcacccagcctcgaagccagtttcttagtgtgtaggtgaagtgcaacctgaaggaatgtcctatgatgtgcctgtgttgatttcgctacaaacagcatcttgccctgggcacatgctttcctcatctccgcccactgaggccctgcccagtcatcaggacacaggcatccgtcctggcacccatcagccccactctggttagccacgtataggatcaggcaaggtctcactcacctcggcacatggcacgtgccccacagagaacctgaaccatgagacattggagggtttataaatcatagcagtcatatctcttctccctcaagttcaaagtggatcgagaaaaagacaccggcctcagccaggtgggaatgtcttaaaggccatgttctcactagtaacgatggataggagaatgaggcataggtctgagccatagtctgactttctaatagttggccgtgagtcgaagccttgggaccatccccaaagggagggaggagagatgagccccaccagttgcaggggatccaggctctgcacctgaggggccctgggaggcggggcgcggagagcagcccccaccctgcagcatgctgcccccatgaggctgctcagttcatcagcacctccctgtgagtggactcacttctcctccccagcctgagaccccctctcctggggttggagcagaaccatgaacgctgtttctcccaggagtgactgagcctccacagctatctggccaaactctttgatattaaatttctgatctcacgtggtcgggggtcctcatggccagctctctctgctttcatgttctctccccgttgctaaaaggtcttgttgaatttattttttatatgcaattttttaaacgacagcagcaacaaatctcaacactgtgttctgcagaaaccgttctgagagcagcatgttgtaatcatccaaacctggatttcccattttaattttattcattttatgactgcttgcatgaggatattaaaactgaaatacctgtaactccccatccaaaatatgcttatctgtttctaagaaaccacgcatcttgtctgagccttgtttgaggaagtgctggccaccgcggctggcacagggtgctgggtgctgccaccgtggctggcacagagcccgtactgggggccgagctcactgtggcgttagggaaggagttctgtggcaggagccgatcagttctagtcccctctgttcaggcagcacacaccccaccaacctgcacagccttgattctccttcattcgacagaagtttattaggcacctgcttgtgtcaagccctgtgccaggcaaggaagtccaacaggaggcaaatgtggtccccaccttcaaggggggcagcggggtgaggggtgaaacagacaacagcgctgtcaggtgagtgctacgacccggcattcacaagatgactgacatgggcaccatggaggttagctgaccccacggactcaagcagggtaggcttcctggaggaggtgacagctagctcagggcctgaagactgagtgatgctagcttgttaaaggcctggggctgaggctggggccaggagaggtagggacagcacatggaaaggctgggcatgttcgaggagctctgtgtagttaggatgaccagggcctgggatttcagtggggacaggagagtgctgactgatgaggctgtgagcatcacaggggccaccccacactggggccttgccagtgttgtcgggggtgctgggatgtctttggaggtctctgagcagaacagggatgttccatgagcccatgtgtgttttttagggaacttgctggctgggggggcagaaaggaatttggggtgtgtggggaggattcagatatgaacctgggggctgaaaggggaatggggggttggtgatggggagggagtgctgcgggtgggtttgagaaccagaaggaggcaaagccaatatgttggaagtggacggaaggaaggagggggcactcttccccatcaggggtcctggcaggccctggagatgccttgaggcttgggagtggaggggtgcaggaggcagcggcacacagggcgtggtggggcagatctgggtatgagacatttcagagagggtagggagggtggatcccgggggagggcagagtaaggtggagaaggccgagggcagggctccaggacctcacgagtgcggggtgacctggcgagggtgaccagctgccgccagaggagagggaaagcaaggagtacaaggaagctgggggagcctggggtcgggaaagggggctttctgcagccaaggcctggagtcaggaaagggggtgctccacagccgggatctggtggcaggaaaagcactctacagcggggcctggggtcgggaaagagggcgctccgcagctggggcctggcagtgggaggccatccgacagccttagcaatgaggaggtcaatggtgttgtcaaacccggacacccctaggtgccctgatctccccacagccctcccccacagggcagccaccctgtgctggcctggacttcctcccgttttaggggctcctcgtagaggcacatccacgtatgacacctgcctccgtgctcacccccagcccagaccccagagggaacgtggacagagctcccactcccttacctgccgctcaggtgcacgccccgcctgttcaccccgtactctccgtgcctgcgccctcatgtcctggcatgaaccctgctttcatgctcctacaccccctaccctgtgtgtgattccacctcctctcatggtggcaccaggcactctgggctgctccaactcacgttgctggagggatgagggcagtggctttggcatcctgcaggctgggttccaaatctccattctgcacccgtgtgaccttggacaagttacttaactcagcctccatgtctttacctgcaaaataggggtgacgctgcctactgcttggggtggtcgtaagagagtcagatgaggtctcctgtgtgaagcatcagcacagagcaggcactcattgacatcagctataccacaccacttcctctgctgcacacactcgcagccgcccacactcgggtccatccaggctctgaatccagcttccacaccacgtacatgtcacactcacacctaagacctcctgcacatgcaggctggaccatgcacacacaaccacgccatccacagatcaggcatgtgtgtgccatgacctgacccattcctgagcacactctgaggaagccgatctatgaaattcacacacctgtgaaattccacagccccttgggttctgactctcactttgctgcacccgtcctgtccctgctgttttctagtggctgaagcaaatagaggggaccgaggccgccctgacccagaagatgctggacctggagaaggagaaggtaaaagatttgactgcctgggggtgggggagagggttcaaagagctcagagaggttgatttgcaggaaggctttgcatgtgttttcctaatgatttgcatgcatttctcaattttgcttttgccccagtggttgttctaagtaattgtcacccatttacttactctttcactcgctcaattactcatcgaatacatattttcagagcctctgctgtgtcccaggtgctatggcaggattagaggcttagtaatgaataagtggggtccctgccaccaggagcaagctcacagacctgcagggtcatgcgttcatgagctcacgtgaatgcagcatgaggatgttaggagagacacagcccagatatggaaatgctggcgcagtgactctaggaacacatgggcatggctcaaatctttgctggccatgaaaacttgggaaactggactttagttttctcattgatgaatgggaaattccagtctgtgctttgctgggttgtgggatgagaaatgctacatacataaccagggttgcactgtgcttggcaccttgggtacctgacaaatggtggtggtggttattcactgggactatggatgtatggggagcctggggaggacagagaaggcttcccagaagacgtggttcttgagtagtcaaaggccaattcgagttctccaaggagaaatggaaatgggaggagaaggaggaaggtggaaggactagtgtggcctaggagcagggtgtggtgtggcaagagccctgactgatgccagaaggcctgggtttctactcccacctctgccatcactgaactgtggcatctaaggcaaggctctggtcctccctggctctttccttccttgtctataaaaggaagtggctacaggagatgaattctaaccctgaaaccctcaaatcagtcataaaaagagatttgcactccggagagatcatgcttgcagggtcttagacagtgacccaggtatgtgggaggcagggagaagtgtgctcagtgagaccaatcgggaggtgggtgatgcaattcaggcaggaaggaagagccacatctgggaaccatgaagacagtcttcaggggccactaggatgtagcaggaggaacctagaaggactcctgtgacttgcgccttggtttgaggtgggtcccttctttacagtcaggtacccaagaggcagggaagcaggaggaatgggatagtcttcaccaaggatccaggtgtggctgtcaagggtgccccaggtcagtgaggctcctgctgggtgattcatgtgggggcaaacggggaagaccaccaagtcccttctcatctgagtgcccccaattcggtgagactgccactctctagcaaacgggctctgaagctgtcatggattcctgttctgacgctggtccctgatggcgcctccctctttctcaggacctgttcagcaggcagaagggctacctggaagaggagctcgactaccggaagcaagcccttgaccaggcttacctggtaggaccagaagtgggtttgacactttggcttcttagactccacattagaggctgctttttcctctggggctgaaactgcatttagggcgctccccagtgccaaacaggagtgataaaaatgccatctccaccttgtgactggaatgaccgtacagactgtccctttttccaaatcaatcgtgattttcaaaaatattcaaagttactttaatggttttcttagacatgcttcttaaattctagtaatcatttgagatgaatgagaagaaactatatttcttttatgtttgattttacttaaatatttagacttaaagtcccaaagcaagttttcctataaataggaaaaagagatgatcacaaaggaacgcagaggtaaagcaattagatgaagccaggtgattttcagaaccgaagggacgaggtataaggtcggatgtaatactgcatttgggttgcaaaattgattctgggcgtcctggtgattaaaatacagtgggatgatgttcaaactcctgtgtcctcacactcaaagctaagtgctcctggcacgagagaaattctccttcggggtggaggggagttgagtaagatcatagaaacttgtcgctgcaggagagagaatttagagttcaatgtcattccttgtaggaagaagctagcgtggtacagagtcttgagcaaatctctgcccagatcatttgtagttaaaataattttacaaaaatgggtttgcacctacaaaatgcagagccaatcactaaaaaaaaaatgactttaaaactctacttcccatgacaggctccaggaagacagagagcaggtagcatgggcttagctcaaatggacaggagatttagacatgaaggccggtgcaactagctatgacccttgtcccttcctgtcgaggctgtgaggcttgaatcccttgagactaggagcaggagatgtagaagatcagaatgaactaaaccttatcaagacacagcatttccctctgggctatcgtttctggttacacgacatttcagtagtgttgagggcaactaacgaatggagacattctccattcgtgttttggtccaggcttggtgcttttgaaaacaccctgcaggctgggccatccccgtcatgcatccctgttcttccctagtgttttccaaaaaaactccaaggaatgtgattttagatggaacttagggtcccgcaaagcgtagcgcaataaagttggaaaactctgaaggacttcttggggtcttagcgtgctaaagggtgagttgaggctccgagaggaatgtaagcaagtggtgtgccaagttcagtgaatcactggaccttttttcaagggacatcttgcagaactggcatttcccaaaacacacttcggaacaccttggggtccacccttcctttgtctaagcaccaactcaggaaggcctgaggggcccctaagaatgctgaatctgcagaagaggcccctgcatgctggttctgccaccatacagaagctaccttcacacttggagtgtttgaaagcctgccatgggcactgtgctcccagtgggatttcagttgcatgggtagacaggagttctgacgcagcccctggattctcatgaacagtcaggaagtgaaatgctctgagagggtgacagggccatgtgtccatgctggggccaggacagcagatgccagatgcaagcctgtgtccctttgtcactgagctgagtgaggcggggcaggcccacaacgggatttccagaatcgagtggtgcgtttctatctggaaactggccacgcaggggtctcctgggagctcggctgctgagtagagaaggggtgagcctgcaggcaccagcaagctctgctccatgtggagcccacctgggggccccgcagctctgccagggaacagattccagccttctagttccccaagggcaactgttggggtgggtagagctgaaggtgatcatgtttgttggttaaaatcagtctggcctgatgggcctggatcccagcagggagaagccagaggagacttgaagagcaagtggcctgatggtgacggagggctactgggttagcctcttcctcggtgatggagggataccggttagcctctgcctcagtgatggagggctactgggttaacctctgcctcagtgatggagggataccggttagcctctgcctcggtgatggagggctactgggttagcctttacctcggtgacagagggctattgggttagcctctgcctcagtgacggagggctactgggttaacctctgcctcagtgatggagggctactgggttaacctctgcctcggtgatggagggataccggttagcctctgcctcggtgttggagggctactgggttaacctctgcctcggtgatggagggctactggttagcctctgcctcggtgatggagggctactgggttaacctctgactcagtgatggagggataccggttagcctctgcctcagtgatggagggctactgggttaacctctgcctcagtgatggagggctactgggttaacctctgcctcggtgatggagggatactggttagcctctgccttggtgttggagggctactgggttaacctctgcctcagtgatggagggctactggttagcctctgcctcggtgatggagggctactgggttaacctctgactcagtgatggagggataccggttagcctctgcctcagggatggagggctactgggttaacctctgcctcagtgatggagggatactggttagcctctgcctcggtgatggagggctaccggttagcctctgcctcggtgatggagggctactgggttaacctctgactcagtgatggagggctaccagttagcctctgcctcggtgatggagggctactgggttaacctctgactcagtgatggagggctaccggttagcctctgcctcggtgatggagggctactgggttaacctctgcctcggtgatggagggataccggttagcctctgcctcggtgatggagggctactgggttatcctctgcctcggtgatggagggataccggttagcctctgcctcggtgttggagggctactgggttaacctctgactcagtgatggagggataccggttagcctctgcctcagtgatggagggctactgggttaacctctgcctcagtgatggagggctactgggttaacctctgcctcggtgatggagggatactggttagcctctgcctcggtgatggagggctactgggttaacctctgcctcggtgatggagggatactggttagcctctgccttggtgttggagggctactgggttaacctctgactcagtgatggagggataccggttagcctctgcctcagtgatggagggctactgggttaacctctgcctcggtgatggagggctactggttagcctctgcctcggtgatggagggctactgggttaacctctgactcagtgatggagggataccggttagcctctgcctcagtgatggagggctactgggttaacctctgactcagtgatggagggataccggttagcctctgcctcagtgatggagggctactgggttaacctctgcctcagtgatggagggatactggttagcctctgcctcggtgatggagggataccggttagcctctacctcggtgatggagggctaatggttaacctctgcctcagtaccatgtttctattgaaactcatggtttctctataccacctgtagtttctttgggagagaagtagctgctccttagtaaggaatgtgggtggagatttaggaaggcagaaaaggaggtaattgtcttttgtccttagacattgccataagatagctacatttaagtgtcttgctgtgaaaacgagtaacatcctgtaatgatgacaactcagctttcacaaggatccccagttggtcactaatgcctcattcagctttgccaaaaagggtggcttgcttttgttgggggttaggggcaattaaaacattgccactatttgctttgggctagagttgcattcttaaggcagctgaaaaccaaatgtgtgcaaatccagacatatttccccattggcacccattagaaaaggggagatttgtttccagggtgaggagagccaattggaaaccaaggatggaataaaacccaggtgaattgcacctctgtttgagtcatgcatcttaagggaatgctatgattactttttcttcttgcctttgtcccctcttgtgcatagtaggggcatctgggttgaatagagtaaaaaatgacaagtgtgcggggccgagttgctccctcacagcctgctcccccgggcactgctggccctgtgcttggcccctgccagttgcccctccctgcccgaaacccccctccctggctctgcctccactggcagcagccttctggtggttcctgtccacctccttgtgaccttcctctgtctgtgtgatctggggtcctcagaaaatccaagacctggaggccacactgtacacagcgctgcagcaggagccggggcggagggccggtgaggcgctgagcgagggccagcgggaggacctgcaggctgctgtggaaaaggtgcgcaggcagatcctcaggcagagccgcgagttcgacagccagatcctgcgggagcgcatggagctgctgcagcaggcccagcaggtaggcggcaacagcggctgtgcccacagcaccccggcacccttgttgtcctgtgtgcaccttggcaccctgatgggcctctgagtgccccaggctcattccagggagagttggtggtaaagcaagtttccaagaagcaagatttcatagatgcccatcatatctccccgtgacggggcaagacgtggggcacttgggcattctaaagagcaaacgctgaaacattcatccaaaccaaagtgccttctccctcggccctccttctccagcatctgcacgctgtttccaggtcagatgctggttacggggaggcatccgctgaatggtttgcttttttgctaccttttgtgatggcggctcattggagcattgggcctagaagctgtaccagttgtaggtctgaaaacctcaatgtcttccaaggttcgatgttgcgtgtgagtttcatgtgctactgagcacatggggagctgagggcttcatgactcctgattgacgaggaagggaaagaagcagcagcatcatgcagagcatttgtcgggcgctcaccatgtgtcgggcagtggctccctgcgctgcagatcctttatctcatggaccctatgggtaggcactatgacgtccattttccagacgagagaactgaggctcagggaggttaactcatgtgtctgaaggtcacccagatagtaaggatctagattaccagtggggagggatgtcacagaaggaaaaaagaagggggatgcgggcagagagagagagaaagagaaagagagagagagagagaaagaggttgacttactttaaggaactgcctcacgcaactgtagataaagatcggcaagttcacaatctggagggcaggctagagccccagggaagagttgttgtatttcaagcctgaaggccatctgctagcagcatgctcctctcctcggggagctcagtctttttctcaaggccttcaggtgattgaatgaaccacacacacacattatggaggctcatctgctttactcaaagtctactgatttaggtgtttatctcatctaagaaagacctccacagaaacatctagtttgtttgtttgtttgttttttgaaatggagtctcactttatcacccaggctggagtgtagtgggacgatctcagctccctgcaacctctgcctcccaggtcaagcaattctcttgcctcagccacctgagtagctgagattataggcacccgccaccacacccagctaatttttgtattcttagtagagacggcgtttctccatgttggccaggctggtctcaaactcctgacctcaagtgatccacccacctaggcctcccaaagtgctgtgattataagagtgagccaccgtgcccatcaacatctagaatatttgaccaaatatctgggtaccatggcctagccaagttaacataaaatcaatcatcatcaccatcaaagggaaagggcattctgggcagcagagcagcatggtgtggttcagcttaggcagcaaagaagctgaaaacacagacactgggaccagacggccgggctctgaactctggatcccccatttagttgtgtggccttggacaaattatttaacctctctgggcctcactgtcttcctcatggggatgatgacaatgcctgtctcactggggcatggtaaggtttagataattattacttgtaaactgctgtcaataagtgcagaccactatggattcaaaagtagtaccctgtatataggattttacagagaaaccaccaccctggaacagtggttgtaatgagcctcactaaaacacctgtttgaaaacaggtgtttggctacctgattaagtcttcaaaccagcttaaacagagggagagatgaaggcacagagacaaaacagctggatgaaggtcagctagccacaaagtgacccttccaggccaggcccatcctgagtccactgccagagccctggtctccacactgcatgatcccctgagggttaactattgatgttttgtgattctttgctagttgctatcatttgatagtctccagaaatctggtattttcaaaagagtattgcaaaacctacatttttttttcccaaagagaaggaattcaaacctgcattacagtgatttttttcccctccaggaacataaaaattaacgttttaaagtttatatatggaaagctatgatgcagcattaggagccataggctctcgggtcagacaggtttttattcaaatcctgcccctagttatggtgtgacctgaggcaagttagttcacctccgtgagcctcaattttcttgtctgtagaatgggtacaatcaacacacacaacttgaagtgttgcggtcaatggagaatttatctaaagtgctcacaaagtaagcactcaatgaatattagctaacatttgctgcacttggcttttctaacccaacctaatcattatcatgtcttctctcacctttatattcatcataatccctaacactcatgtattcaacacgggcgacactacctaacacaaccaggtgctctggcaacactcaccccacttctgatctggcccaagcactagctacccgcttcaaccatggacagaccctcccagtctcccagtttgctgtggacattaccattgtatttcacctggaatctggcccacagggtgcagtgatgtcccctgcccagccccagctgaaattggcattttccagccctgttaactaagaggagaagaggatgtgaaaacatccattagtgaatggcacctttcccagcggaatgattctgcacttttgtaaaaggttctgcctgagtgaaggttggagtgaagccactggtgtaaattcactttgtcctgaccctctctgagggttcagtagcactggtttcgcttcctagccacagttggcctgcagagacatctgctgggacaattcacgatggcaatgccctctccattgtctctttctctgccgaagccttcctaacacagagcaccaccacagcacccccgcctcccgctgagaccctcactggctccctggtgcccagagtacaaagtctgggttgcttagtctgaccttcgaagccctctagagccccttccaactgccacagctgcattgtccacctctctcagagttgcccctgctggccgtcatggagctgtgttttgctttgttttgttttgttttgttttgttttgttttgtttgtgttgtgttgttctaacattcgtgtaccaagcactgttctaggtgctgtggcaatattccagcccagggaggcagactggggctgacccacagaaggggctcagtggacattggttgaatgaaactcacacgagtcctttgaggacaggtcattgatgccatttttcacaggggagcagagtgaggctcagagaaggtaagcaacttgtccaaggtcacacagccaggaagcaacagagctcaactgtgaacccaggtcatcagatgaggaaactcttacccactgctctttctggcctcccacactctgatgagagactgtttcctaagcgtgaatatcaagaaagatcagaatgagaaccaggttgtcaggctgatttttaaagcccagaagttgttcctgggggattctcagatgttctttggaagctgtaaagccagacattagattacaaagcattgtcctgcagatcccatttcaccctcggtgtcatggggtcccacacagacattacagcagaggggtccagacacagagagatcatgtcactcacccagagcccaacagctgctacatttggggcccagaattcaagccgggttcaggccacatgccctgcttactcagcagcactcggccgccctgcatgtgagggggttgccaggaaactcctgccactaccagactgaggtcacacagttcccttcgggtgggagagagtagaaaattatcagtttaaaaaaataacatatggagtgctcaatgccaagctctgctctaaacacttggtacaaatttgcttgttaaatccttagatgtgggcagcacccatctatagataaggacaccaagcctcagggaggcagaataactgcccaaggtcacagatctgagagaatcatctttttttctgtctccttcgtggaatccattctgtttggctgccccgtgatcatcctgaaatcaaaagctcatcatttccctgcttagaacccgtcactggctccccatggcaaccccaaagctgtgagcacctcatcgggacatgggccattccagaccctctgagctctgtccccgaccccccaccaaaggcctcttggcctcctgcacatgccgttccctctgcctggaattcctttcccctcttgtgcatctggtgaactaaccctgctgggttccacgtctcctccagcccacggcacgatacctcacccctcctcatgcctctttatttatttattgagatggagtctctctgtgtcacccaggctggagtgcaatggcgcgatctcagctcaccgcaacctccacctcccaggttcaagcaattctcctgtctcagcctccctacaggagcgcaccaccaagcccggctcatttttgtatttttagtagagacatttcaccatgttggtcaggctggtcttgaactcctgacctccggtgatccacctgcctcggcctccaaaagtgctgggattacaggcttgagccaccgtgcccagcccctcttggttttcttgatggtgtttgtattcatctgatgccccttctatttatgtgtatgctgctattgtctgaacggtaattgaactataaggggagggactttgtctttctctccaggactggaacaggcccaggcatatggagtcctatttactgagtgactaaatgtgcccacagtggtggttctcaaagcaggggccccggaccgtctgcgtcctcatcacctgggagcatgctggagtgcaactttcactcaggtcccaccccagctgggctgaggcagaagctctgtgggcagggcctggcaatctgcatttgagtaggctctctgggtgatgctgacacaggctggagaatcactgccctacggaatgtgagatggcttctctgggcctgaataaaggcctatggtgaccccatgtttaatttttgctggctgaaatcgtccacccttccgcctcccagcattgtctcattgtatgaggtctctatcccgttcagggcagacaagggccagcagcccgctgggcagagttgccccaggggtacccaccttggtggggcccttgatggggcggaagccctgtgagcacatgaagatctggaaacgggggagttcaccagattccctcggtggagacgctgtgtgggatgggaaggaatgatcggtaaaccacccagggaattaattctgcaggtgcggtgccaaggagggtaactaagagtctgggtttgcccaggactgaggggtttcctgaggctcacaccaggaaagtcctgggcaaaccgggtctgtcggtcaccctggtaccacgtgctgagtggggttctaagagggcagggcggatgctggtgcagtggctcccaccagcattgacctcctctgcccttctccctccctccccccatcccccaggctgcagttaaacaaatcttagacaagtacgtgatgtggtgtcacatcccacccatgacctttattagctgctcagggtgcctacatgttttggtccagtctcgatgttttgtttttaaaagatcccctcttaagaatgtgtactgtgtaattctatttccagaaacttctagaacaggcacgatccattattagtgatagaagtcagaacagaattcctttgcagagctggaattgagccgggggaccaaggcctcctgggagctgggatgctctctgtcttgctttgggcggtggtgacatgggcttgtgcatgtatcagagctcatcaggctgcccacagtgttggtatcctttacagcttctgtgctagaccacaataaaaaataaaaacagagtttttaaacctggaaaacttactttttctgacacgtaacctggtgtatttcagagaatccgagaactggaggacaaactggagtttcagaagcggcacctgaaagaactggaggaaaaggtaggtgactgcagctcagactgtccccaggtttctttccatgaaatgttagtgcggaatcattttatttcataaggtccaaagcatagactctgtctccagccctcctttctctgcccttcttcccctaaatcagcatctcatggaaatcgctagttcctcaaaattcctttctggtaaaggcatttccttctcaatggctgtcaaaaattcttcaggccggggccaactctgtgtgtctttttcacaaaagactttcccctgaatccctcccctgctgtctcactaggaaagaggtgaagcacattagcccgatgaggtcagtggcatccccctaaccacagacacaggttctcctccatggactcattcactttttaaataccttctatgagccccagaccagtcgcatgttcctggaagacgcagcctctcccatcccagaagacgtgaggctggcctctcaatgggctttgggtatgttccaccagcccatttaccatgatgcccattttatgagtgaggaaagtgaggcagagatagattaggacacctgtccatggtcccacagctaggaagggatggctgggttctccatggatgtcatagccatcccatcctgcccctccatatgacattggtccaggcagacacatgagtctggctcaggacacacacaaagcagttttatcatggtattgcccttcatcttcttccaccggatggctgtgagtccttgaggacagggaccacgtggtgtgcatctcttcattcaagacagttcttgccacaggatagggtatcatcaaatgtttgtggatgagtacgcaaatgattctagatgagtacagaaaaacaataattgcctatttaatgtcacagaggtaagttcaagtgtggcaacaagatggagagccgctgaacccatccaggaggtccgtggccggcatgcctgtgctcgaagagggggtcccacctgaatctcaaaggacactgtgggatcagccctgggaagaggaggtagaaggggcatctctgggctttatgtgtctgaggccggtcttgtgagagaggaagctgacttatttcagggacaaaccagggcagaaatctctggaaggcagattccagggctgtccaaaaatgggatgacagcctttccagtccagtagggaatcaaaccatgtgcccagagagatgggacagcacttaagattccacctccgtttcagatgcttcctctcccttctctcatgacagtcggctccatgcagatgaaatcaccttcccatctctgctggaggtgtagggccctgccgggtcgcaagtggaccgaggatctgtgcgcaggggcgggggcagggcttgcctgccagttcccttgttgctctcatgggaaccccagttttagctgattcctagagtccccgtctgccagatgcccacgcctaccagcctcccaaggatattctgagaacccaagggggtctcaagtataattggatttaagaattgcttgagggatgagctggtttcgcagatagatgagcctgggctctcctctggccttgcccaggtaggcccagagagcctgggaaattcacccctctgccccacggaattcacccctctgcctcaggccttggtgttctcatgtgctgctaggaatggtgctctgtctctgagggtggatgtagggataaaatgaggttggggatatgaaagttcgcagcccagggcccaggcaaggcgtgtggactggcagcaccggttcttcccatctcccaggtagctctaccacttgtgttggtaaaatgagtcacagagccagatatgataaaagaaaggcttaaaacatgcccaaggtcatccttgctgattaaaatgttaaaagtcaggtggaatgagcgcacacttaaaataacactcactatgtcctcggcagtgagaatacctgggaaatgttggaatcgtctttctggctcttttttcgactcttttctcaaagcctatgtttggggactggtctgtctccttttgccacagaagggagttgcggaagctggcatgcagagcaggaggaactggccaggatggatgcctgacgaggcctgtagggctggaaaccttccaagatgcctcatgccaccttcatttccttacaggcatcggggcctgtgaccgtggaaatagctccagccaccactatccctggccccttggtcccttcgtcattgccagaaactctttcctgccacacccccactggatggtcttaacgaatccttccctcttcccaggcctcagtttccccatgtggaagatgaagggctgggtgactttcaaggccccttctagctctgacttccaatgatcctacacctcgtttagaagttgatggctgttagtttggacttttccaataaataatatagggagatattaccttgttttgggggggagaagaactcaaggattattttcaaaagccccagttgatgttcagatatgtttcccctaatgacttgcaactccttttgaacaaagcaagtcctgagaagggtaagaaaaaaattctacttttgagtcggtgtgtttaatttttcctcccgttaagaccgtctttccctgattttttttttctctgtataagtagactaatcaaatggcacaaaagattttaaatagcgactctcttggaagaaagaaccctggtaaagatggtgtagggctggggtgcccaatcctttgacttccctgggccacattggaagaattgtcttgggccacacataaattacactaacactaacaatagctggtgagctaaaaaaaaaaaaaaaaaaaaatgcaaagaaatttcataatgttttaagaaagtttacatttgtgtcgggccacattcaaagctgccgtgggccacatggggcctgtgggtagagggttgggcaagcgtggtgtaggcagaagggctctacttgtctgcaagttggactgggtgaccttgagtggaatttaccctgatcttcggtgcacacatcacgcccccgtctcttggtgggagccgctgaccatgaccatcggctgggccttcctctatttataccggcctgcccaagttctgcatgaaggccacatcacagcaccaaaaagtcctgtcccggtccagagtgtcaatctcccctgaatgagttagctgcatgtttggagagtgggtcgggataacccaccctgagtgtggaagaccccaggatgcgtttcccaggggagatcacttcctaaagcctgtttacttcccatttctctttccgaacccaacaactcagtgtcctagttcttgtaaaatgctgtcattgagttccatactacatatcttacatctgttttcttttctttttcttctcttttcctcattttcttttggtattattttatagtttttgttcctttttttgtttttctcactagcattcattctgtggccttgatgacttcagtgagccaagaactcgggttggtatcctttccttttcgcagatgaaaatgatgattttctaaaacaggaggagtcctcccagtccctgactgtcaagttccttgagagatgaggcaccgtggaaggtggccttgtgctggatgctttaactcatgggtctgggtcatggggggagacccgccctgaggagggggatcagggacgctcactgtgaataagaaactcctctgtggagtttcatccacaaagggggactgtgttttattccaaaggttctctccagtctggcttcagtccctggtgctctctgttgctgt

SEQ ID NO: 958 - DNA, 2358 bp, Homo sapiens
gtgtggaccgcaggatctcagcactctgacccaaggggaagcatgtcgaagaaaggccggagcaagggcgagaagcccgagatggagacggacgcggtgcagatggccaacgaggagctgcgggccaagctgaccagcattcagatcgagttccagcaggaaaaaagcaaggtgggcaaactgcgcgagcggctgcaggaggcgaagctggagcgcgagcaggagcagcgacggcacacggcctacatttcggagctcaaggccaagctgcatgaggagaagaccaaggagctgcaggcgctgcgcgaggggctcatccggcagcacgagcaggaggcggcgcgcaccgccaagatcaaggagggcgagctgcagcggctgcaggccacgctgaacgtgctgcgcgacggcgcggccgacaaggtcaagacggcgctgctgaccgaggcgcgcgaggaggcgcgcagggccttcgatggagagcgcctgcggctgcagcaggagatcctggagctcaaggcagcgcgcaagcaggcagaggaggcgctcagtaactgcatgcaggctgacaagaccaaggcagccgacctgcgtgccgcctaccaggcgcaccaagacgaggtgcaccgcatcaagcgcgagtgcgagcgcgacatccgcaggctgatggatgagatcaaagggaaagaccgtgtgattctggccttggagaaggaacttggcgtgcaggctgggcagacccagaagctgcttctgcagaaagaggctttggatgagcagctggttcaggtcaaggaggccgagcggcaccacagtagtccaaagagagagctcccgcccgggatcggggacatggtggagctcatgggcgtccaggatcaacatatggacgagcgagatgtgaggcgatttcaactaaaaattgctgaactgaattcagtgatacggaagctggaagacagaaatacgctgttggcagatgagaggaatgaactgctgaaacgctcacgagagaccgaggttcagctgaagcccctggtggagaagaacaagcggatgaacaagaagaatgaggatctgttgcagagtatccagaggatggaggagaaaatcaagaacctcacgcgggaaaacgtggaaatgaaagaaaagctgtcagcgcaggcgtctctgaagcggcatacctccttgaatgacctcagcctgacgagggatgagcaggagatcgagttcctgaggctgcaggtgctggagcagcagcacgtcattgacgacctctcactggagagagaacggctgttgcgctccaaaaggcatcgagggaaaagtctgaaaccgcccaagaagcatgttgtggagacattttttggatttgatgaggagtctgtggactcagaaacgttgtccgaaacatcctacaacacagacaggacagacaggaccccagccacgcccgaagaagacttggacgatgccacagcccgagaggaggctgacctgcgcttctgccagctgacccgggagtaccaggccctgcaacgcgcctacgccctgctccaggagcaggtgggaggcacgctggacgctgagagggaggcccggactcgggagcagctacaagctgatctgctgaggtgtcaggccaaaatcgaagatttggagaagttactggttgagaagggacagatttacagactggaaatggaagagaaccagctgaagaatgaaatgcaagacgccaaggatcagaacgagctgttagaattcagagtgctagaactcgaagagagagagaggaggtcgccagcatttaacctccaaatcaccaccttccccgagaaccacagcagcgctctccagctgttctgtcaccaggaaggagttaaggatgtgaatgtttctgaacttatgaagaaattagatatccttggcgataacgggaatttgagaaatgaagaacaggttgcaataatccaagctggaactgtgcttgccctgtgtgaaaagtggctgaagcaaatagaggggaccgaggccgccctgacccagaagatgctggacctggagaaggagaaggacctgttcagcaggcagaagggctacctggaagaggagctcgactaccggaagcaagcccttgaccaggcttacctgaaaatccaagacctggaggccacactgtacacagcgctgcagcaggagccggggcggagggccggtgaggcgctgagcgagggccagcgggaggacctgcaggctgctgtggaaaaggtgcgcaggcagatcctcaggcagagccgcgagttcgacagccagatcctgcgggagcgcatggagctgctgcagcaggcccagcag

SEQ ID NO: 959 - protein, 768 aa, Homo sapiens
MSKKGRSKGEKPEMDAVQMANEELRAKLTSIQIEFQQEKSKVGKLRERLQEAKLEREQEQRRHTAYISELKAKLHEEKTKELQALREGLIRQHEQEAARTAKIKEGELQRLQATLNVLRDGAADKVKTALLTEAREEARRAFDGERLRLQQEILKAARKQAEEALSNCMQADKTKAADLRAAYQAHQDEVHRIKRECERDIRRLMDEIKGKDRVILALEKELGVQAGQTQKLLLQKEALDEQLVQVKEAERHHSSPKRELPPGIGDMVELMGVQDQHMDERDVRRFQLKIAELNSVIRKLEDRNTLLADERNELLKRSRETEVQLKPLVEKNKRMNKKNEDLLQSIQRMEEKIKNLTRENVEMKEKLSAQASLKRHTSLNDLSLTRDEQEIEFLRLQVLEQQHVIDDLSLERERLLRSKRHRGKSLKPPKKHVVETFFGFDEESVDSETLSETSYNTDRTDRTPATPEEDLDDATAREEADLRFCQLTREYQALQRAYALLQEQVGGTLDAEREARTREQLQADLLRCQAKIEDLEKLLVEKGQIYRLEMEENQLKNEMQDAKDQNELLEFRVLELEERERRSPAFNLQITTFPENHSSALQLFCHQEGVKDVNVSELMKKLDILGDNGNLRNEEQVAIIQAGTVLALCEKWLKQIEGTEAALTQKMLDLEKEKDLFSRQKGYLEEELDYRKQALDQAYLKIQDLEATLYTALQQEPGRRAGEALSEGQREDLQAAVEKVRRQILRQSREFDSQILRERMELLQQAQQ

SEQ ID NO: 960 - DNA, 35998 bp, Mus musculus
ttaactaatatacagttgccacaaaacccaacgtagtcatggaacatctctgtgctctaacaattccctcgtgtctgtctctatgttgtctatctctagcctgtggcaaccacttatctattttctgtccctgtggtttaagccttgtcccacgtggcatggcaatgggaccataacaaggctctcttagcatcctcacatagccagtttgtgcccagcccattcattcagagcacggaccattgcctgacaataagttattttcattatctacttgatttctctttcatttgagtgtccacttgcactaggaagtgagacagggatttttgcctgtctgctaccgattctccaaggttcacgaagcaacctaagtgttcagtaaatatttgttggatgacacgctatgtgaatgaagagattggggaatcctgggaccctcccccccagtggggggggggctcaaacagaccttgttaagaagagataattttccttacaaaatgtgttaattgaaggatttgtctgttgccttgtaggttggctaccggagagtaatacaatcaagagacaccatgctgttgaatggtttcttcaaattcacctggatggtgagattacccagaacagaactggcctgaggtgaggaaagccttctggggttgttgcaggcactggatgacttaatgggcatgaagtgtttactgcagtggttttcatctgggaaccgttttgttcccccaggggctatggcaatgtctgtagacatttttgttgtcaaaagtaggacagagaggacagctactggaatctgctgaagatcacagaatgtgcagtatggtgctccatgacaaagaattatcgcagaatgtgtagccaggcttgaagtaaggggtgcatttgcatttgatgatgatattattattaattattattacatcattattggtagtagtagtaacagtagaaatatcccccaccgtgtgtgtgtgtgtgtgtgtgtgtgtgtgtgtgagatgtacatgtaagatgtgtgcagatgttggactacaacagagattctggaataccacagagcctcccagagctctcagagttacagacagttgcgagctgcacaatatgggagctgggaatcaaactctaatcctttggaggagggaatacatgcttttaatggctgagccatctttccatccctgtgctaacgttatttacaaatgacccttcctaacaaaccctctcacccaggctggcagtgaagctgtgcataaagtctcaagtcagactctttacgtttgaagctcagcgtgagccttggcagcgtgctctggagcaagttacgtgacttttctatacgtctctgcctatgaaaggggattaattagagtaattgcctcagggagctgccagggagtcgaacgcagtagtccatacagagcacaccactgcggtagtacgtagtaaatggtcaataagcctcattgattacttttttgtctctgataccaaaaaagatcttcccacaggatataacgaaggaattaagaaaagtttccactagggaggagaaatagaaaatattgctcatataaagtatacactggcattaatttcacataatgatagataactacatagggttaaaattaaaataaaacacaataaggctattcagtgtgtgtgtgtgtgtgtgtgtgtgtgtgtgtgtgtgtaggaaatcaaagccagagtattcaactagcagcgttcttcacacacagcctcgggatgaacacttccaccacactggctcaggaaagggagcattctctcctccacggagtacccgctgcagagcagagtctgggttggatgcctcatgggaggagaccagagtcgaccttcaagtctggctgaagaagaaagacaattaatttgagaatgacaaaaatgagggtttcagggtcgatctaaacccaaatcctgaaagttagcatgactcctcatgctaaatagagtaattgtctacctcaggaccactgtccccaagagtgactgctaaccgtggtgctttctgatgccaaagccctttcacgatattatcacacttgtcccttaagaatctcatggtcacacatggtttcttcttccttttgtgtctgggatagaaggccctttccctgttcaaattttctgagttctagttttgtttcagaaacccacaaacatttaaaaaaaatgaaacggtagggataaaagaaatgacgtggggtctaagaaccaccgtatgatgtagtcagcagtgtggattacacatcacttcatcctcagccacaagcagccactgcaaaggccaccacaagattacacagtcgttgtgtctagctgtcagcccacaccaacaccaaggttggcttctctctaaaagatacctgatgatttcagcaatataatttgtgtgcaaggcagactctgaaggatcatagtttctctaaagagcagagtaatgtctagagctgaaagctgagctatacatgacaatcaagaacctgctgaagccattcaaactagactccttaacctttcctggtcacaggctggccagacatggcatcccaaacttatgtagcttttcttatcaaagccagctaatggatacttctaatgattctgggttatagaagtgactaaacaggctgcattaagttttcacaaggactttacagaattctagccttcctctgcactcagacttgtaagcaaggcacagtgaaactagactaccctccatggtctctgcatcagcccctgtctccagtgtcctgccctgacttccttcaatgatagactataatgtccaagtgtaagccaaataaaccatttcctcccaaacttgtctttggtcatgatgtttcagcacgtacagccatagtaactctaactaagacaaacattagttccagggtaatggggtaatgaggtaatgatgtgatagagctgtctattctgttttggggagaattatgaagggacttggaaactttggcactagaaaagtcatggagtgttcaaagcttggtaaactgttctctgagagcatagaaaacaagagtcttgatagaaatacagaggatagaggcctggcttctgaaggtccaggcttggaaagttggagagtcacttaaagactctattgggaccgttgcatattttgagttgagaatctgtagttctggttagctagggctgaagaattggctgtgagaaaccagaaccacaagcacgaactctttcctttgctgggataatcgatgctggttagctggagctgagaaactagtggtgattaagaggagaccagcagcactggggtgaaagtgtttcctgagactcagcacacaaaagcagtgttccagaggtggccaaggttgtcccatcgcgctggcagccacacttggtcccgtgtcagtctcccagaaggtactggttttgcagacatgaaggaatcacggagagcagccgaggcttggcactgtgagagtccaggagagaccactggtgaaggtgcagccagagtagcaattgaaggtccaggattgaatgggtcatgcagagaagttgaggcttggcaccatgaagagagcctgtgagaggctgttggtgaaagtgctcgcttcacggtgccaagctcttctccatgactccaacgttctggaatctcctgccagaattttggagattccaataccaggggatgaccaccaaggagagcggaagctgtggaatggaggcagtctaaacctagaagacaagctttagatgctgttgatggccatccaagccctttggagaattccaggtgatcctgagtggatcctagacgttagacactaagttattcacatagctggactttgctttgctttgactggcactgtgccctggttcttccctcgccaataattcagagttatcttttttccaacttttctgttacttcagcttttgtttgcttgtttgtttttagatagagtatcctgtagtccaggctagctctgaacccactaagtagccgaggatgacatggactctttcttccacctctgaagcgctttgattgcagacatccatgaccacttattgcttcagttttatcttcaaaatatagaaagtcaaataaatttaaaaaatttagcatacctgcatgtttctgagggactctcacttaaaactgaattgattataagaaagtatagcttaaattttcagaatttctggtatttagactgcaaatgtataagggtgtactttatatatttagaaatttcagctgggaacacttaagtggatgatttatggtggtcagaagaggcaagacgttttggcctattgtttttaatttttgtcatcgagcattgaaagataattgtaaggaaaaatgtcttattttctaacaaaagttgctaatctgacaagagccaatattctataaaatttttccaccttgtaaaacttttatgcaaatcttttactctctaccacctggtaaaatattgtttacacaaagactgggctacattcccagaacttgagggactgaagtagccaacctctcccctccctttttcttcattccatcacatcaattctttcctttaaattcttattttactattttatatatgtgggtgtttggcctgaatgcccgtctgtgtgccacatgtttgcctgaggaaaccaaggggggggggacattgtatcacctggaacataagttacagatgttgtgagttgccatgtgggtgctgagaactgagtcccggttctctgcaagagcagctagtgcgcttaattgttgagccatctcacaagttggcaaattgtgaaagatagtgaggttggacctcagcccactggcattattttctactttatttgtgttttttaaaaatctcttcctcccttctaatgcttattctttctaacactccaaacccaggtaagagagaaagaaggttagagaggaaagggggtgtaggtgtctttaaatgacttcctgctgactaagggcattgagttccttgggtcaagtccaatcttcatagtccatcttcacaatcttcaacttcttgtctcttttctctcacccataccaatggcagcatcaggagcagaaaccagcagcagccattttcttcttcagcgtgcaccccttagtctctgacattcattctctctctagactcatcagaagtaaactatctgcagctggcaggatcaggttcctgcccgaataccacgaggcaaatagtcagctgctgtggataaactgaggttaccccatgtcctacagcctggattaaaacaaaaacacatttacataacagaactggttttttttttttttttttttaagtcaccagaattctcactacaccatccagttctggggggttgcaagttgcatagtctccatctgcattagaataaaaaccaagtgaagatcctcttccaatgtgatagctagtttagtttttgtcttgctgcagcctttttccagtaagaaatttcattgttgtggtggtttgattgaggatggccctaataggctcatatatttgaatgcttggtcaacagggagtagaactgtttgaaaagattacaagaattaggggtgtggccttttggagtaggtgtagctcacaccaggcccagtctctctctctctctctctctctctctctctctctctctctctccctccctccctccctccatctctctctctctctctctctctctctctctggctgtagttttctcttcagcagcacggctacctgccgccatgctcccactatgatgataacgagctatgtctctgaaactattaagcaatccctccaattcaatgcttcgtgttatgagctgtcttgggtcatggtgtctcttcaaagcaatgaacagtgactaagacacttgccaagctacttttgttttgtttgtgtgttcctgtgccacactgggattattctttgtttctagcagacccaacacccactggatgtttggaatttgtctttggcttttgttctgctgatatctcaagcagttagtaaccgcaggcagaatgattgaagacatttataataaccgaatatggcaagatggctcagtgggtaaaggcacttgctactggttgcactccaacggaagcatctgcacagggcaaagcttcatcttgataaggtgggtgtgctcagaagggaagattagttgcacattaacggaaaatgtgtttggtttttttttttcctaacttaggagatggtgactgtgtcttccccattgggtggggtctgtccttaaaatcatatttgattgactggaaagagtttgtatataggaaatgaaagcagaggaagggcgtagggcattgctcctaggagaaaagagtcactaacagttcaggtcatcaaattcctgggatgtagcaggagcctctgtgtgaccacaggctttactcgtgggcgggattaaaactggcatagaagtcttacaatgtgggagggataaaaagctttgaattccttgctgtcttagggttttactgctgtgaacagacaccatgaccaaggcaactcttataaggatgacatttaattgggactggcttacaggttcagagtgtcagtccagtatcaccaaggggaaggagcatggcagtgtccaggcagacttggggctggaggagttgagagttccaacccttgttctgaaggcagctagcagaagaatggcttccaggcagctagggcaagggtattaaagcccacactcacaatgacacacttcttccaacagggccactgatgtgttagaatagtggcttacatctggacataacacactaggccaaagcagttccacatgtaagaggttttactggaaacaaagaggggagaaagagaaagacaaagggaaaaagaaggtgaaagtggggaagggtctttcttttatatatgctgtgatgtaacctgtttgcaggttaagtgtgggaagtggactttgggaagataatgtggttgccatagcaacaggtgacacctatgtgtgacatcctgagtttagagtgatctgtaacacaggccttttgatgccaacagccgtacctcctaatagtgccattccctgggccaaacatatacaaaccatcacacttgccctaaacacaagtttttcagtatttgaaagagaagactcatgtttaacttgtcttacaccatcaagcatgatgacctgagtttgatctccaagacccacactctataaggagagaaccaactgctaaaagttatcctctgtatctgcccagtgttctctctctctctctctctctctctctctctctcacacacacacacacacacacagtaaatgtaaaaataaattaattggattagcaatctacaaaaatgatcatggacaataacattatttttcttactatttggtgagtcagagatagcacaaatgtctagcaagtgagttccagtttggctgaaagggtctgatcccctgtatcctcagagcagccagcctgtggtctaggatttatgggccttctgttgctctcctgatagccaccatctggacaccaccagagaagccaggtgcagagcacaggattgtagccaggacaaagggcctttcaagaaaattgactttaaagtgtctaaaaatatgataaccagattgaatcagagtggtaggaagcaaggtggtggtggcagcagcaatagcagttgtgatgctttgtgtgtgtgtatgtacatgtgtgcattggaatgtcatgcattatgtcagaatggtttgattgattctaaaaaaaaaatgttttacgaagtttcctgtgtttgaggcttggctaccagctgacagatttttgataaatgaatcagaatgcaagctctgatttaattaatagattaatccatgggactcttagctgaatgaattattaaatgggctctcagagggaatagattgctgggggattgcttttaatggatatatttgttcctatgtgacctatccaccacgaggtgagccacgttgctctgccatgttttgcacaatactttgcctcaccttgcacagacccagcagcagtggagtcacgtgactatgcactgaagcccctcaacatttgagcccaatttatctttcttcccttaagtcgttttgctcacatttcgacacagcaaccgaaaatgactaatacagacctggcagaaatattacaacataggaagccattaaatcaatttttatatggatataagaattactgagtattttaaggtactattgcaacatttataggcgaaagaatagacattaagatatcaaggaaggggaaaatagaatatagttttataaagggataaaagggacgttgtaatcggaggaatgatggggtaggactgggagggctggggagaggaggaactgtgccaaggaccatcaacactaaaggcctttgagaagtcgtatggaattctactactgtagaagctttctaagatgtatatttatatacagagtttaaatggagttagcatatcatggggcagggggatcagtatctcaactagacatcatatactaccacatacaactcccagcaccaggagtgagtaacatcattttgaattattggccaaagggatcccatagacccccacaaacattgcagggtattgctcctccacgaccggacagtaagcccctattgctgaaggctacaaatatttatagagtatcaaggggtccagatggtccttaagtggaaactttactcctactggctagtgttcacataataatcctttatgatattctcaaaataaagtataggcttgggaattctgtccctattttgactgctcaggtcttccaatccccttactgaggattcccatgtgtatgtaaactgtagtatccagtggaaagacaaatgagttcattcttggcgcatctaatctttgtcccttccctccccacccacctgttgttccataaagcgcaggagagggtgagagagaacaaaagagggtcagcggaaaggactggttacagaattgcagcactgagcagggagcaaaggatacatttgctccaagtacaaactgaaatactggctacattttattgtaaccagaggaggggtggggggtgggggtggggtgagggggcaatggaaatgctaactacttgcattgtctaagtaagaacatttgcttgccatgtatgctgtctgtattcatcaaagttttcccctatccttcatttacactctaaaacaaatgattttttttttcttttgcaaggagaacaagaatgtggattgcgtcatagtaaacgctgtttatagacgtaacattaacaagttccattcggccacttgcagagacaacggtaaagcagaagcccaaattttcataagtctcttgtttatgctcatatcttgcactgtttactgtcttccaaacaccagaaccaagcacagtgtctggctttcagagagattaactatcatttactaagtaaatgagtgaacaatgtttataaactggggtagcactgacattcgtcctttggtttttggttattatgttgtaggttacatgtaccatgttgttcttacacattggtaaacatgagaaacagatttaaatctggagccagaccctctgtgtttcttaagaccatttcctcatctttcgtgtttatcagttagcacaacagttcttgttagagggtggctttattaggcaaagtgactcaaaatgaagaagtctcagtcccgggtaacttttttttttttaaagtcagacccaaacggaagtgagtatgaggtgaatctcaggaacttgaagtagagcagagatgagaagcaggaagcaacatactatcaagctaccgatgggaacacatttgtgtcatgtgagtagacatgacagaaacagctttccttaaattatttgtggcaatagtgatcaccttcattttagtcctgccagaatttttcaagacaccaaaaggtaagtaaaccattgcaatccagctctcgtttcttactttagagcacattgtcagcgagtggtgacagacgagatcttttggggtgtatgcagcatgagctgaagttcggtgagtgaactgccttaagtgaaacgagataccaatttttagttgcctgttatctagcatagtggccttaggacttagttatgttacaattgaaaatgtaaagaaatatttaaagtctgattttcgattccagacacgggacttaagagaatagcatcttatgagtttgttctttgaaactgtttccttctttcaaaataatcatatatatctgcttttatattctggaacttactaagggaacggacatttatttattttaaaatgagccatttgatcacaaggtgagactaataatttcctgctgatcttagaaaaataggagtaaattttagtatttttaatatgcagtaaaaccagatgggtacaaatataggcaggtatgtgtgtgtttgggagcattgggaacaaggcaaaacccactctgagagcccttcaaagaattgttatatatttgttgaaacttcagggtagagaaacaaaaaaataagggaatttaaattattttttatatattattaaaagattggaaaacatgttattgtgggtgtttaagtgataattgtgttcattagcctttaataagaaggttaaaaaaaaaactccactgttctattactaaataggaatcatataaatttacgaaaactagagaaaaacttatatttgatatctcgctgcaatgaatatttattgtcgaatatatgcaaagatatgtattcagataaaaatacttttgctaattatatttgatgacatactgcaatgattatttaatgttgcatattaaatgatgctaagtagccagataaaaatatttttgctaaataaacactgtaactgcaatttttacgaatgatcgaattaaaatttttttcttttggtttggttttttaaaaatatatatatattgagcacgtatagtgtatatttttgatacttattttcacccgctgaaaatgtgtcctaaagaaaatagaataaagacaagttatttttaagatattttgggcttagagtagcaacatgtttttagctatctaagctaggccttctctgtgtttatattcctattactttgaccaattagtttgcatctaatgaatatcaggtaactggcacacactgtttgctaagttggtcagtgctttaagagtctattaaggattgtgaggaggagggaaaagacagaagaattgttcttttgaccactagttcttgctacaggtgacaccagaagaccagtgtggcccaggaaaattcagagaggtgcatggtgggcacctcagtgggcctttgattttgtaagcagaaggattcggttttttgtttgtttggttggttagtttggtttgtttttcaaaatacacttcagctgaacttgcctggccagagagccagtctgttcttcatgttgacaagagccatttataagatttgttttctcagctgccactgtgcttcattgcttgtcctaaaccagaaggaaccacttctgttttctggttggagcgttctggttggagccagcatcaacggttgtttccattctttgggatgatgaaattatttggctattttgtttcaaaggatccttactgtggaacagcaaacaaaactgcaaactatggtcttctcctgatgtccttcagtggtggaaggaattttgctcaaagccaccacaaagtgttgattattgggttaactcacacacacaatagtataataattatgttttataatggtctgtgggtcatcaggattattgctataacctcatcatgtgtaaccttatattgattaaattaaggggatgtggatttaactattttgttacttaatttgaggcatgagggcgggggggtgggagggtgggtgtggtggtggtggtggcaaggtagccctggctgtcctggaacttgctatgtaggccacgctggccttgaactcacagaaatctggctgcctctggctcccaagtgctaggattaaaggtgtgtgccaccatacctggccattaatgttagttttcaatctgagtatgagttaggactctcagggctaaggcctgtcaggcattttccttttcttcctccagattgtattgtctttaattctaaaataaatatgacaaaattattcgacttctaaattacttaccaataccctgtttttggccatgctaaataaactcagaaggaatctcaaggtggatcaatgtatacaccaagtttagtatatgtattttcaaagcaataaactttctaaatccccaaattgaaaagacagcatcatatctgatcatattttatcaagaatacatccaaatctttgaaaaattattaacaggaatcttctgttgttacaattatgtagcaatagctatttggtctaattttaagaatgagagtagatattgcttgccactaaacaagggggcattggcaagatgacctattgtccaacaatagtctgaagcccccagttattttagaaggtatccagaacacagcagttgatgaacagcttaacccacttcaattgcttgtagagaatggaaatactgattccatttcttgcaactgaggaagcaaggttgctcccaacgacaaaatcaccaacctgcttttgttggatgaaaccttaagatggagactcaggaggctggagaagtggctcagtgctcaaaagcaccggctatattcccagaggacctgggctcaattctcagcactgcatggcagctcacaacagtgtaactccagacccaggggatcctacactgtctgctgggctgcacagccaccaggcgtgcacatggtgcacagaaacacatgcagacaaaacacacatgtaaaatttgagatggagacttggttaaaccttagatcccagtggtctgtaatttattctttcacttatccatggtgtctctctgtgctgggaagttaaggcttacaaaaggaaaggcaagtctctcctaaggggtttttcagccacgaagaggaccagtggtggagcaatgaagtacaaccccataaagagtaaaacgggatgtggaaggagttacgagaacattaatgttgtttccaggactatgctgggaggtttcctctgttcccacttgccaaaaaataataagttggcagaattcaaataatcccccactattcttgctcacagaagcattttctaagagaagtcatgattcttattgattttcaaataaaatgttcgcatttatcttaaaactttacgagagcagacatggtagggcattatggaggcttgcagcaagcaggacaagaacagtacagatgagtacactgcgagtcattatgtcccggtgttttgatgttgcttactttgaagagtcaaactctcataagatagattcattggctttcatttctcttccctgtcacactttctggtggaagtggtggtgtaatgagcagtaaacagaggcaaaccaaggatgaaggacctttccttgggaattataggacaagccctcctcaactctgcagtgtgtctccactgtgtttatgtttctattacaaaggaagagtattgacacagttgcaatgaatgaatgaatgtccttgttttcaaactctgggcactttactttcttcttattgacttcttcataaaaatttaatcaatatccctaataaggtttaggacatatgactatttaaattttgagctggcagaggtcaaattgtcttgcccagaatgctctcaagtgattctcccacttcaccctcccaagtactgggcctatgggtgctttccactgcatctggctcatttagtgtgtgtgtgtggggggggggggctgtagcacatgtagcagccagaggtcaatgctaagcatccttctctattgcttccaccgtaattattttaggcagtatctctcattgaaccagagcttatgaaccggcgtgactggttcctggtaacctctacggatctgcctgtttccaacccccagtcttagggttacagatgtgtgccaccatttctgttatttttaagtgtgctggggactcaaagtcaggtccttgtgctcatgtggcaggcagttaaatgactgagccgtctccctagacctctggctcaatatttgtagaaactcttaacaaatacgtgcatctacatataccaggcatgggactaaatatttttacatggaactccttttttttgtttttgtttttgtttttgtttttcgagacagggtttctctgtgtagccctggctgtcctggaactcactctgtagaccaggctggcctcgaactcagaaatccacctgcctctgcctcccgagtgctgggattaaaggcatgtgccaccacgccggctccatggaactcaattttaatggattcaatactcaactaatctactgggaaatgtagaacaagtgtttggcaggtataaagctctaggtttggtcttgggtagctgctggcccatgagcggatgggaactctatcttgacctcctattttgccaagagtgctggggttgctgacaagcaccaccatgccaggctttggcacaagttcagggactctgaactggggctgtcagtcttgtttggttacactttcacctactgagtcatctccttagctctatttttagtttcttgagaaaccgcctcacaaacaaatttccaaagtggttgcaccggtttatactcctactgggagtgtgtaaggattcctctctcacggtgtcctcacagcacttgtaatcattcgttctccttgatggagggcaagtcattctgactgcgctaagatagaatctccacatagtttaacctgtattttctgatggctggtggtgttgaacacaaatgtttattggccattaggtattcttctgttttagaactctctgtcaaatacatttacctgtttattggttggatttgtgtgtgtgtgtttgtgtgtgtgtgtgtgtgtgtgtgtgagagagagagagagagagagagagagagagagagagagagagagagtgtttagtttcttcagttctttacggattctgtatatttatcctcatgttaaatgtataatgacaaagctgcttctattctgcaggctgtctgtttattctgctatgcaggagcttttcagcgtcatgcagtcaggatatcatgtggctgggttctagtgagggtcctctagatacagatgtctagttcccctgaatttgcatggggcagaaaggaagcaagttatctggttttataaagcacaattcctattctttagaattccactttcatgaattaattaccccatagactccacctccaaatatatcatattgagactggagtttactagatgagttttaaggggatacaaacagcacattgaattggttatttaattttacaagacagtgccaaatagtttccccaaaagattatattagcactgttcctagtagcaaaaatactatatactgggatttcactgagtatcatgaagctgtagatagaatacatagactcttatataatccatatgttccttacaaagtttactgacagcttgctaattgaaaaataactaaagcattacagaaagaagactcagaatagttatctggcaagcaatggggaaaactttgtttgtttcaccttggacgaagtgagggggaagaccttatcgagagtttatacatatctgccataatttggatactgaggtctattgtgtgcaagatataaaaagctcaatgcaagaaatgaactgaaggcattttggatcaatggtgccattagacacacagcagaggcaaataccaatattctgtggaggaagaaaaaaaaaaaaccaaaacaaaattcaaaccagtcctcaaataactcccaaataaaataccaaagaaaataagctattaaccaaaacatcataaaacacatggagactaaacacacgagaaccaacagaaacagcagacagcagaacctggtcttgaaagaatattatattacatttattaataattaaagcattatacataaatacttaattatttcagtagataagaggagccttcaaaattataaataatagaagcatatgtttggatctttatttcatatcgaatatggagccaactcaagacacatttaaaagcattgtaagatccaagactgtcaaactgttataagaaaagattcttgatttgttggtccctaccatgactttcagaaatgtcatcaaaagcagaaggaacaaagattttaagatagacaaacagaattgcatcagactaagaaaataaataaatgtaagcaacaatcaacacagctgtggacaagagaagatatttttaggacacagtgtaacagctatagtcaccaatttgactaccacattgtaaccacaattaagacttaactttccatcttccccaaaagttctctcttgctccaacccataagaacccctccactgccaaatattgtgcattttcctaaatctcatataaacggaaccatgtgatgcacagtcacctgtgtggcttattcgactgcacaaaaacaccattgtgatcgtccatttgtttcttatagtttcttctgtttgtccccgagtgctattccatcatatgccagaggttgtttttagattcactattcactggaaatgtggattgttttcagttcttggctcttacaacattggaaagctaccataaaactcatgtgcaggtaaaatagaagcatctgatcatgcggatgtttttatttgtgtgtgtaaattcctaggagtgaggtttggggaccatatggtaagtatatatttaacttataagaacatgaaatctgttccccaatgtagttgtgctgttttgcattcctatcaggaatgtatgatgtaacacttcaaagcatcattagtttgaaccactaaaaatggaaacaacccaaatgttcactgtcagaaaatagataaattatataataaattcattcataagacccaacaatttaactacagttgtgccaagccaacatgaccacagcatattaaggaaaaggagcaagtcacagaagaacacatatggtaatgctatgcttttgtgggcttctaaaatgtgctgagatacagggggctgctgagattgcttcaaggatgttggcaacagcccacttctgaatactgggataggaatactaatatttgcctattttcattctccctgcccccagatagggtttctctgggtatccctggctgtcctggaattcactctgcagaccagggtggccttgaactcagagatctgcttgtctctgcctcatgagtgctgggactaaaggtgtgtgacaccactgtctggtgttattttcactcttcaatgtgcacaaagcatcttgtacaaacatatgtgtgatctcttcttacagcaaaagttaaggaaggaaaatatagctctttagtgttgtcctttgcttctctttgaaaaggagaaaataattggcctgcccctttctccaactctgttttcctaactctatttagtattcggcgtacctcctcagggaaggtgccaacttggtactgaagtcattctgggatgcatttgcatctctcagagtgggcaggtagaggtctgactccaggaatattaatggaggtagttaaattcacaaagtcctggttatggaggtgggaatacagcccgcccaatgcctaaagctgttggggaggaggatttatttttaaaaattataccaagaaaggctgtgtcctctacttattccttttccaatagaattatttaaaattgaggtttaaaaaccacataaaacaaccagatagtcaaatatagagggtattctatccattctggaaagctgggctggccacttaattgaataagactgcaatgttgacagcaaaattgtctccctctcctttctaggtcatgtcatagcaatataaattcaggatgtcgaaaatctcgcaagatcaaagtgccagtgagcgagatggagaggtggcaggaaacacaggcttcatgtgttttagtaatattgagagaatcctgagagcattctgtcagtatgtgcacggccctccacctcctttgattattgctactaaacaaaataatttttaaaagatttatgtatttattttatgtatatgagtaaactgtagctgtcttcagacacacctgaagagggtatcagatcccattacagatggttttgagccaccaggtggttactgggaattgaactcaggacttctagaagagcagtcagtgctctgttacagttatgaaccctttacaatttttactataaaatatttataacatcataagatttatttgaataaaattctgtttcccccaaggaaaacttttattaacaattcaattttgaaatttcttcaccattagaaattacatgtgagttatttgagaaatacttttaaatacagagggctaggacatgagtgtttaaattattaaatgacagtacaaatcactagtaatcagatgcttatggaattactactaaaatataaactccattaattaaaactgtttttaatattagtcactagtttggcttccttttaagcctgaaccaaggttttgaactaaaggtaactactttaaaagtggagcacagttatctgtggcacttagagatcctaaactacatggtagagaggaggtgaagaaaccacagagaggtaggattggccatgtcagttatttcgtatcaaaaaaaaaagctgacgctatctgagtcactagaagacgtgttacctagtccttaatagatcacactgctagatgattatcctcaattacgcaatgagctcaaatttgttcatattaattagatcacaggtaagccctagcctaggcaagggaggcatttaaattttattcatttttattttgtgtgcgttggggtttaatctgcatgtctgtctataagggtggaagatcccctggaactgaaattacagacaattgcaaggtgctgtgtgggttttgatcagcctgacccctgtgcatttaatttttttttctttaaatctggaacacaggatcacatttaaaaatttgaaggccagaagaggatgttgggtgccctggaaggggaattagagatggttgcgagccaccatgtagatgctgtgggcccttcagaagagtggccagtgctcttaacagctgagccatctctcctgaccaaagggcctgcgttttagacagttcattgtagtaaggtagaaacccatgataggaaggaaccgctcacccatgactgggaacaaaacagtcaagtctcttagtggtggatttggtttaactcttgtattattttaactgggttcccaaaattgcacgagattcctcacaggtaagacaccaagggtccccagctctagttggctttgattggtaaataaagttgtcagaggtcaatgactgggcagggagacagaggaggtactttaggattttggggctaggggactgggagaggaaggaggatttagaatcaccaggccaagaaagatccaggcttgagagctgcagaagagagaacacaccaatcatgtaagaccggggaagagcggccccaggggtccctgattgggtctacagtagcaaagatggaatatagattttagtaagtaataactcgggagtattggaggggaggcgttagcaaggtggaagtttgagagtggcccagtcattgagctgtttagggcatattaaaatagaaggctgtgtttatgtgtcttccattcaggaactcagaacactggggcaggtagggaggaacttatgccatgccacacagtgatttgagtagagaataatcgcctatggcaacatctctttgtctacttgctctcactctttccggcaagtccattccttcattagagcctactcttttgggaattccagcaaatactgaagatccactgagacgccatccttgtagactgaacaactgctggattcttagactccccatcagtaaacagacactgttggtctagctggactgcagcctataagctactctaataatcatacatatccatatatgtacacatacatatacacacatgtatacaaattatatatgtgtgtgtgtgaattatatattatatattatatatatatatatttcacttattctatcagtttgtctttctagagaccgctgactctacagagggagctttgacagagcaatagagctgggagagtagaaagcagagacagaggagaaagtactgtgactatagagatggtggtatgcataagccaaggtacacaggcagctaccaggagaagaagactcttctagattccctaacgcttagacacttcaggatttctaactactgacattaacactgaacttctggccacccactcttcttccgaatgaccaaggttgtggtactcctttctagcagacttaggaaacagacacagaaatgctgtccaggttttggtatcttttcttcagatccatgcaattgactttttgaacatagatcgattcagacaaacctaagatttatctgttaatttttccccagcggctggagagattggccggtggtcaagcatacttactgttcttgtagaggacccaagttcagttcccagtgcccatgtcagggtgctctaactccagttccaagggttcccacgcattcttctgacctccacagatgcacacgtgacatatatcacacacacacatgcacacatatacatgcaggtgcatgcacacatgcatgcgcgcgcgcgcacacacacacacacacacacacacacacacacacacatcctttgaaaatttccagaagcagggatggctactgtctctaatcacttctctacatgggtatttgttctctgaaaactaacacggaatgttgacaagtttaaaaaaaagaaatgcttaaaaggagtagatactaactcatgtgaaaacaaagccttgtcaaggactagccatcctctgccgaggaactacgaagagcttactctgtgtttattcaaatgtcaaaaactcaggaatccgcagctagctaacgagttttgttttgtttctctgcagaaagaacccgtgagctctcctgtctggaagtgtgtttcctgcctaatttcacctctccgctttcttctttcaatttttcttctgtggcttttctgcaaccggcagaggaaatacagactattatgggaatctctccaaatcactccagtttccaaagcttcgctgagatttgccgaggcatcacaagtagattgccgatgtgttccttgtgtttggtttgtgaatccaaaggagatgtggatttcacttctcaggaacaaacatcaaaaggtaaacacaaaggaatagactgacatttaccaagactaaattaagttgttcttgggggtgggggaaagcaaccattccagggctggagagctagctcagtgggtaaagtgctttttgccttacagtgtaaagaactgagttctaactctagaacccacataaacactgggtgctgtggctggagggatggctcagcatctctttcagaggaccagcatccacgtggagcagctcacacctagctgttactccagggctggggaatccgacacactcttctggcctctgggggcactggactggtgtgtacatgcatgcacatagatgcacaataaataccaaataaatattaaagaaaagaaaaagctggcataccggagagcctgcttgtaatcccagaggtgccaagtgggaagcagagacaggcaggtctctggaagctcactggacatatggcatatgctactgggtggagctctaggccaatgactgaccctgtctcaaacagaagtcaaacggcacctgaggaaagacacccaaggttgtctcctgaccttcaaatgcctgtgcttgacagagtacactgcaccctggcccccaagcattctggtttaacctctggtgacactggggacacagtggtgtggcttctaatgagtgctttcacagggctttgtaaacttgatgagttttagtttaacctattgaaaacaaaattcataaaatctatccggatgccagtgtaattcacatgtatttgctagctaaaaggtcagctgtgtgttctctccagagagtgattgtttagaataaaattaaaaacaaacaaacaacacttctaagtaaatgcttagcagtcacccaccgggtatgagctgtcttctgtctctccagtgggcctcttgtgaaccaggcagttcattcacaaattgtggaatatgctggtagcctcaagcctcaatatcatcatcatcaccatcaccaccaccatcttcgtcaccaccaccatcaccaccaccatcacagtcatcctttatttagcagaggtgctcctgtatcactagtcactgaactttttttttttttttcattctttgagaataaggtcaagattccttggcattgctttggacataattgttattcctgtagttttataaccatctttagatttttgccccgaatctacagaaaacgagttggggcagtgcctctgtgataatggaaggctaggaagcattttaaaagcaggtggttggcagccatcactgctctgtcgcctcagacatacgtgaacagggctttgaaatgtggtcgtcatcctggccgtgtaacaaatcaccacaccaacagtggcttgaaacacaacaatcccctggtaactaaagatttatttagttctaatgtgtgtgtgtgtgtgtgtgtgtgtgtgtgtgtgtgtgtgtgtgtgtgtgtttgcttgtatctgtgcaccatgtgtctgcagtggccacagaggccagaagagggcattgggtcccctgggactggagttgcagagggaactacatgtgagctgccatgtaggtgctgggaattgaacagggtgctctggaaaagcagtgcggcctcttaactgctgagtcatctcttaactgctgagtcatctctccagaccctgttttctttaggcatttgccagtcagcagacattcaggtggtttccctatttcagttattgtgaactgtggggatacgtctttgagagtctgatttcggcacttttggatgccagaaggtgagattgttggagtaagtgagattagaccgctcagtctttgaggaacttgttaactatttcccaagctgactgggcggtagtgtctatcccactatcagaacaaggacccacattacccccactctcaacagcattctttattcatcttctccacatggggcaccctgacaggagtcagttcgattctgatcatggcgcaaacttgcatttttatgatgacaagtgatgttgaacatgtttgcctacgcccattggatgtttgcatccacccacaggacatggatcttttaacagatgtaagaatctgttcaggttctgtgcgggattgtttgttctgagacacggttttcttatgctacccatgatggcctccaactcctagtatccagcaatcctcctgcctcagcctctggagtagctgagacagcaggcattaccatcatacctgatatttgcccattttaaaatcaggttgtctgtttttctccgtactcctccttcctcgatgggaattccttacatgtcctggatatgcccgtttatcagctataccctgtgaatctttcctcccatcccataggctggctcttccctctctggatggtgtcttttgtttgtttgtttttttttttcgagacagggtttctctgtgtagccctggctgtcctggaactcactctgtagaccaggctggcctcgaactcagaaatccgcctgcccctgcctcctgagtgctgggattaaaggcgtgcaccaacacgccctgtggaatggtgtcttttacgttgtctttccactttcattcaagtcccaagaatcttgcagcaagttagccataaagtgggccttttcacggtgactcaagaatctggtctttgtatcccaaaggaccaagtggaactacttcaccttttcctgcttggtgatacaatgccattttttttttctttcttctgcacttgactatcttaaaattaggtctggagtcttgagaaaatgaccacaatattcaaagtatttcagcaaggcaaaaaggtttgcttttacagaagggggtgtagccagccttaatcaaacaagcaagtatgccctccaggaatctcactgggtttttattactaactccaaggtgttctgcgcctcactgggagtggccagggtgcttagccttgcatcctgctgctggctaacttaaagcaatgcagctgagaactgctgataactgagacggggatgcaactttgaggtcatactttgatcttagaaaactgctgactggggaggaattttgttttttccctgagaccgtagctttacaaagttctttaaaaacagagagccaactatgtctcctttaaatctttaatagaaaagtttcatttacatgcccacaaggagaaaccagtctaactctccagtactctatggggagggagctaaatccccctatttgtgggaaatcagtaaaattttgggataacatgtggtgtagactgaaatgtatcctctcaaattttaatatgttgaagtattaaccttcttcaacactgaggctgtgacatctggaataagattgtggtacatataattttcttaagatgagatcactgtcctggaacctagctcagtaggactgatgtccttttaaaaaggagacctttgggctagggaggtactcctttttaaagtgctccccagccaagaaaaaggacacaagttagatccccagaaccagaatgaaaagctgtgtgtgtaacatacacttatagtccctgtaatggggaagtggaaggattctcgggacttgatgatcagccagtttagccaaccagcaagctccagattcctgcaaaataacaaaggttcatgtctgccccctacaggtgtacatgtaggcacacacattagcttacacactatgtatacacactatgccaatatgtcgacatggaaaaacacacacatggaaataccatgtgaggatgaaggaagtgactaaggtggtgtttctgtaagccaaggaaagcaacaattttaaagttacaaatgtgataattatgtccatagcttctttttctattttaagagatttgggtctttggttggttgcttgtgatcgtttgtgttgttgttgttttggtttggtttggtttttgaggcaaggccttgcactgtaaccctgggtggtctggtactgtcctccatcagcatcccgagggttagggacatcataactatgtccagtgatacttagctctgaattatgttttcttattagatatcaccactctgcaaataaccggttctcaacctcgctgtaggtcttgtcatgaggggatcaatggaagtgacggcaagtgatttgtcctcaccctgtcagtattttaacatcaccgccgctcttatagctgaccctgtgaaggaagacaacactacctgcactcccgaaacccgtcctggaaaagcctcagctgtcgatgaagatctggccaggaaaaagtctctcaaccacacttgtagatttatgaaaagtacgaacaattgtgctcacattttcttgcgcctagaaacggatgtaaaacgtaagtttgaaaggaggttagagggaatgggagaactttggtatctatacaaaaacattaagaaagagctgtgacattaaccaaatgtcaccggaagttgagttgctgaagaattttgttgctgaaacaatgcaacctgaaagggtattaacctttctatgtatttagttttcctatcaaaatgtatttttatgggactcaaccataatcggagatagaggtggtatgtctgggttgtgagagacatgacttgggacactagaaagggacactagaaagattctgtcctaggagagctgtagtatgtctggtatctgtgcttgatgaacagccgacaaacctcagaattcaaaggtgggaggttttttttttttttttttaaaggtaagtatccagagaggattaaagttggcttttagccagttcaacccatcctctctcagagctgacacagcccaggtgaggagagttttctgatgtgatgttgtgtggattaggcacctgggggggggggggtgtcaccggttgcttctgaggggtaagaaggtcggatgtatgtaaagtctgttcaaggctgattaagtccctaacaccctgttctgagccccacagttaatactttttgctaagcactgtgccccacctcaccataaagtctattattagaaagcaccttatggtacatcccttcagcgagcgccctctggatgtcaagccctgtgctgggacgggagcccagagacagaggaccagaaaactagagaatgcaatcacctgtaaaccgtgcctcctggagctgctagtgccatgggggactcttccctagacattttggtgctccaagaatatgggcgttttcccattactttagaatgcttttctaaagcttagccatattaaaggtaattattttttaaaattatgttttcagcaaacatagatatagaaggtgcagcctccccaaatgttccttcacacgagtctctggggatattttctatccaaactgcatgtaccagcctttacctggcagatcaggatttgatccttcatctctctggccacccatccaggtcagcggggtcctctgtctgcaccagcgttcacactgttgccccacctccagggcgccggctgggcctttgttaatttgagggcatatttgggggggctacgaccaagatgattaatggcacacagctctgactctagtgccactgccctgtggcactcttgatgtacaataagaacattggtattggcatcacctggaagtgaaattaaatgctaggggtttgaattgaatggatccctgggagccacttggccaatttcctcatttagtagctttatttcatatagtggaaagacattcaggggagcaagggaccctgttccagttaaggctgcaaacgccttcaccattaaaggcatgtgccacaatattgcctcttatctgaggtactatctcattgtgtagagtgtgtgtgtgtgtgcatgcgcacacacatgtctgccatagcacacgagtagaggtcaaaagacagaaaccagtggttggttctgtccgtgcttcctgtaagctatagggatgatagaactgtgtgttgttgagtacttaagcctgctaactagctaactagtcctttattggtttatagtgtttaatatatatatatttttaatttttatagctgtcacttgttccatgaagatcacttggtacattttagtgctattagtttttatgctaagcatcatctttattatccacaaaatacttgaagaccacaggaaagtgcggagatggcagagtaagtactaagaaataaacgcgttgcaaggactgtctctgtgagggcattcctttgcccaggaaaacacatacaaatacctgtttgccccctgattttctttttagttcagatggccacttattgtgtacctactatgtgtaaatgctggttctagacactctaagaaagtatcagtcttcgagtcagctagcaagcagcagcctgctgtgcttcctggctgtgaagggagttcccaggtggagggagcagcatgcagaataagagtgatcaggactgccctgacttccctcagtgctagactgttaccaggaagtgtaagacaaataagtccctaccccaagttgcctccggttttggtatttgtcatagccccagaatgaaaccagaacaatatgtaaacagtactatgattttcgttttgtgcatgaaaaggggaaaaaaatgaccaaactcagaaaagttcatggtttcgtccaaagctgcacaattaacaaaattacagtataaagacttggtattttataggcattgaaatctttattttaaataagtgtatgttatttgaaaataattttcatagttctatgtttcttgaactctttttctatgtgaatacaattaagaaagaaagatacaaggtagaaaaatgcctagaaagacatgggtagtgggacattacccattacggtacccattacattacccagtacattaaattctttcaaatacctatccagatgacaaatttgatggctttcaaaggtttttcttacaagtctaagcatataaagtcatggaaaaaaaatcacaatactcatgccattacacattaatctgaaatgtttcctagatactctacatatcatatcaacgtagataaaagtagtattttataaataagggttgatacttttcatgagcagacgggccataatgatatttatggtagtggagaaaccatcactttagaaagagtctgtgggtttttgttgtcgttattgttttgtggtttgtttgtttgtttgtttgagacagggactcagtacgtagctctggctggcctggaactcacagagatatatctgcctcttcctcccggggctgtgctaaggttaaagacttgcaaccaacaggccctcgtgtttgttaatgagagaggacttaatggtaaaagtccttcagtgtcttgttgctccagaccccttttggaactccttgataaccctttaaaccagaaccaagaagacagcaagaatgtgattttgtaagggaggggcactggggtcttactatgtagtccaggctgacttcaatcagtatcctcctgcctcagcctcccaagtgctgggattagaggcatggaccaccacagctaatgtgcttgtttgtcatctaaatgtttaatttcttttcttggaacaggtcataagtacaaatctacatctggtctcttaagaggaggtggctctgtgaagctgagcactttgagcatgagggttattccaggtgagtctgcggcagcctacggctaggacaggagattcccaaagctgctgtatcagttcagagcaagctcaagatcggagttcattttcagtagccttgggactggaataaaggaactgtgggcaaatagaatccagcttagtatttctcattatcaggggacagtcatgatcaaagccacctccctaaataatggaaagtttgcctaattggcaagaagaaactcctgtgagtaggcaggggagagaaagccatagggaacacgcctggggtttatttttaaatgagacaagataccattatttctcagaattgcatgaagtaattgtagagtgggcagagcctctgccggagccttcacttcacggggtgtctttgtataaagagaactcctaatagcctcaattaaaaagccccctgtcctctccggagaaaccgggagggactaaggggatcctaattagagcagctaagaaggccgtgggcacagatgctctggctccagtctcatctctttctgactgtgtggcctcctgaattcctgctgtcaagtcacattataaagagagactatgatatggacagggggatgtccttttccttcacagaaaagaaatgatttttaaaaaactggaaatccaatctagggcctggagcatattaggcaagcactctacacagctgaggctgtgtccatcccctctttctaaattttgagacaagatcccattaaattgctaatttatagctgagatggtcctcatacctgtgatcctcctgcctcagcctcctgagtacctgggcttaaaggtttgttacacggtctggcttttgtttagtttccattttaatctcttccagtctctctttctccctctccccctccccctcctctgtgtgtgtgtgtgtgtgtgtgtgtgtgtgtgtgtgggagagagagagagagagagagagagagagagagagagagagagagagagaaggacttactacatagcccaggctggccctcaagaattatagttctcctgcctcaggcccccgagtagtaggattatgcttatatgcctgtcaagaaggaatattttgaactctttaaaaagtcacagaattgagtgatgtttactgatattctttgtctccagtgggtggacagctcctttgcacttgtgagaagatacaaaaggaggcttcaggtctgctgtgtaaactctttttttaaaaaaaacgacaggaaactggacaacgccctgtcttctactgcagggcaacagcagccacctagagacccagccagcctttcccggggggatcatgtgcctaacgcttttgttagctactgaaacaagcagtcacccagacccttagtctgggaaaaattagactgtgtgcgcctaaagacctaattttaaataatccagacttcctagttggtattagcaagttattaagccatgtatggttacttagcattagttaaacaatatttagtgtcggctacatatggatcaagttaatagaaattttgtgtggttcatgaaaattttgtttaattaataacatatttaaaaaacaacccatagtatggttttaaggagaaaaaccgattcctaaagggaggtaatgatgatttgtccgtctgtctatctgtcggttcgcttatctagtatacctgctctaccccaggaatggtttaacccaactctgccgagttttgtagttacctaaggaagcttggccatttctgtttcctggccataattttgagcacagcagtcttgtctgagaacaagtcagttgttcccttgtcacctcatataattggagaagtcacaaattttaagtcccggctagccacaagatgagcctcacaagttatatttatgagcccgtggctttcctgcatccaaaaaagcctgtctcaggtctgccttccctcaatggttctcaataaaaggcccctggctttactaccaggcatatcgttttaatgttcggtgcagagccagggtgatgaccttttaaaaaagaccagcaatccttttaaggcttaacatcttcaaaaggagagaggtggattcctttttatttatattcctttaacctaaccgcaccacctcaccgctaccaccattctaagttgctctttctgagagaaatggaaagaaaatcacgtctcccctgagcgctgtttttaaggctgctctttgtaatgatggattacaggcagcagggagaggtaagggagaaaagcctgccggtctgaatctctggtaatgcggcagcatgaggtaaagaaagggaatggaaaaagcaaatgcctgtgcgccgcattcaacagtcaggtgtgggtgccagccacgcactccagagtgactctgtggctcatgaacgacaatactagtattgtcacacgggcgcccactgcgtagggagactcatccatcctcaaaatgtccaccctccaaaaaaagaaacaaggagagctcaccggatccttcctgagcctgatacatgttagagccgcgtggaggaagtgggccctgatattctcctccatgcccgagaaacagggcggatcatgttgtcttcttggtattaattttcttactttcttattcactcagttatcatcgtcacctgagtgatgacttccttttacccatccttgtgttcctcatggtagcatagcttttggtaggccagcacagccctagggagagagaggcataggaaagcggaggtgagcaagacaggaatcctgcctggtgtaatagcccacacctttaacctcagcactcgggaggcagagacgagctgatcgcagtgagtctgaggccagactggtctacatagtgagttccaggaaagtcggggctacatagtaagatccagtctcaataaataaataaataaataaataaataaataaataaataaataaaataaaatataaactttaaaattaaaatcttattcttaagaatgggaaaggtgaaaacgaacatgcagagtagcaaggactctgaatcactgcgccatctctccagccactgccttccgtgttcttgagatgaacgggagacatccacttgcgtgctgggcagcctttgtggaatcctgcatcaggtctctgatatcagtgtttccactcgctccagctgttgagcgggagaaggtgtcattccaatatcttgcccaatggtgaaaccgtcccaacccaaagctctccgtctttaactctctgtactgaacactgcagcactacctgccaaggatcccagcaaacacgggtgcctcaggcacggcgcctcctgcacagggccccagcaggtacagagaatctgctccgggttgtcttaggataagggaaacccttgttgaatcaagtcctggtctctgtgctgttctttgacacacatcaacttacttaattactttaatttttctgctagcgagaaaatggaatctaagagagtttaagtaactggtttactggtcaaagccgctgaaggcacacaaagcgaagacaatgggattttgtgatacttggttgaagttactgatttataggtagtttctagagtcagggttcattcaatcaattctgcccaaacagtgtagtctgaagacagttttcaacgggaacgaggacctggggatcaggctggctcatatcaaaactcttcttgctttttacatctaaccctggaaatggagatgaaacctgctccctctaaaaagctgtagcagcttctgcgacccaatgagttctcagaagagacaggttagcactggttgagagcattttctttcctgcagttaacgtgggcgggtcctaaggtaatgcagagaagagaaaattgacttttattgtgaaagaggcttagcgaatgtcaaaagtaggcggatggcccaattcatagtatccccaaataaaactaatggcaatgtaaagttatagctgccagcatgtttatgaccaggctaataaagactatgcaggtttcaatttcccgcagaagagaagataaatgactggtgccagatgttttgcaactaagcaagataacatgaaatcctaatttttacttgcttaactattacccataatattgatgactcttaaaatgcaggttgggttcataaaacagggaaggttatagctatctgcttggttatagactagctgaaaatgcaaaggatggctctttcttggcaggaaggaattcataagtgtgaagagtccacagctggaatagaatgatttattctaggcattcactgaatgtctttatgtgacagctatttatactagctctgaaagaaagggatggcaaaaatatgcttcgaacatgtcctccatctttgctcagatggtccctgcctaaaccctttgcctccattgctacccactgtgtgcatcccctttctctctaaccctgactttgtcttatgatctgggcttaaccaacactttccaagacaaattaagtcagtcgattgtttgcaagtaggaggacctgaattcaagaatagccagagacaggtagatctcgggctcactggtcagggagcctagcttacttgggtgagccccaaggccagtgagagaccccatttcaaaacagcagcacaaggaggacaggacctgagaagaaatggcacctctggtttctacatgtgtacatacatgttcacttgtgcatgcacatccatgcacctacacacatacacaagcactcaccccaaactcatttcatgtagaatatgaacatatttacatgtaccatatatgtgtgtgtgtgtgtgtgtgtgtgtgtgtgtgtgtgtatgtatgtatgtatgcatgtatgtaggtatgtatatactgaacaagtagtagtttggagacaagaacataaaatagttggtggggaaaacaggctttccaaacatgaggtgtagatattttcccctgtgggagacaaactgatcttggacagaaaacccacaagcagtaaagtgatgtgaaaccccctggcaggttacacggcgagaacacaaaattaccttggaaggatgaaatgaggttagagcccagatgtcctagatgcaaaagacctttgaacttcgatagaaatctctttgaaaagaagttgaagcattgcatgcagggcagcctggacatggtcacaggcagtgtgataggctttatttctactgctggaaatccgtcctgtttgtgagattcagccaggctgaaatccgcactggggttctttttaatttttaaaagctctttggagcttcctgaaaaatgtcaaatgtttgggagagagaattgacaaattcttgaaaagacgtttgtgatgtttccaaatattcctgacagcccttgttgcctttatgagcattggtgaattcatagtatttgagagaaactctattttccagtgtagcgtgataggaaacaatttcacttgtcttagctatgctgaagaaggtattaaaatgacatacacttgacttcgggtgttttttaaatcaagtcttagaagctttgcaattagcatatgagttgcatgtctttggataccaggagaaaccaaaaatattgtaacactagagaatattccagaccagccattattttgacaggtaatagcttttgataccacattatggttattctctgctgtaaaacatccacaaactgaatctacaagctgacgctgagcagctagctctccagtcagaagaactttactaattctccttgatatttatttcattttatgagtaggctcctttgatataacctttaagagcggtcttcaaatctcaaattgcagaaggctgcccaacatgtcttgtctaagggttgtctaagcaattatttgcacagaaaatttattctgaaagctttcatgtaacccaagtcaagttggaagtctagaacatccaggatcccaggcttctgggaagggtgattcaaatctaatagatcttagacagagcccaagaatttgtaatcattgcctctggtgaagttcaggctaacacactattggtcgatatattagtttctgtggtgtaaccaattatcccaaacagtggcttaacacaatacatgtgagttatctctgcttctgtgagttggaagtttgagcactccttagctgaggatggcttagctcagagacaaccaatgctaaactaaaatgttgattatgctgtattcttatctaaaaaccctgcttccatattcatgcctggcagaatttccttcatactgaagaccttggcttcttgctggctatataccaaaggccagtcacagctccttcatggtacctacagtcccacgtgactgctgctttgaggcggttagagtctctctgatcttggggaagacctggtctctctttagagagctttattagtaagtcaggatcagacccactcaaaataatctcccttttcatcagctcagagctaagcagtctgggatgctgattacatctgtaaaataccttcatctttatccagtaatagaagctaatcttggtggctgggaactttgatgtgagactgggctgacagaagtggtaccctagaggtggctggtatttgttgaccatgaaatgaaaatcaaaggatgttcagggcccaagtacaagggttctgtgaggaag

SEQ ID NO: 961 - DNA, 619 bp, Mus musculus
atgacagaaacagctttccttaaattatttgtggcaatagtgatcaccttcattttagtcctgccagaatttttcaagacaccaaaagaaagaacccgtgagctctcctgtctggaagtgtgtttcctgcctaatttcacctctccgctttcttctttcaatttttcttctgtggcttttctgcaaccggcagaggaaatacagactattatgggaatctctccaaatcactccagtttccaaagcttcgctgagatttgccgaggcatcacaagtagattgccgatgtgttccttgtgtttggtttgtgaatccaaaggagatgtggatttcacttctcaggaacaaacatcaaaaggtcttgtcatgaggggatcaatggaagtgacggcaagtgatttgtcctcaccctgtcagtattttaacatcaccgccgctcttatagctgaccctgtgaaggaagacaacactacctgcactcccgaaacccgtcctggaaaagcctcagctgtcgatgaagatctggccaggaaaaagtctctcaaccacacttgtagatttatgaaaagtacgaacaattgtgctcacattttcttgcgcctagaaacggatgtaaaac

SEQ ID NO: 962 - protein, 205 aa, Mus musculus
  VARIANT (1)...(205): Xaa = Any Amino Acid
MTETAFLKLFVAIVITFILVLPEFFKTPKERTRELSCLEVCFLPNFTSPLSSFNFSSVAFLQPAEEIQTIMGISPNHSSFQSFAEICRGITSRLPMCSLCLVCESKGDVDFTSQEQTSKGLVMRGSMEVTASDLSSPCQYFNITAALIADPVKEDNTTCTPEWGKASAVDEDLARKKSLNHTCRFMKSTNNCAHIFLRLETDVKX

SEQ ID NO: 963 - DNA, 86899 bp, Homo sapiens
  misc_feature (1)...(86899): n = A,T,C or G
aacaaatattttttgaatgaattaatgaatccaaataggagagatagctcgtattccttttgtagtggccaaacagctttcgtgcaatttatcttataactgaatcatgtgacttagatgtattaataaggtctaaaacacagcccacatttaccttatttaaaagtagaatttggccggaagcggtggctcatgcgggtaatcccagcattttgggaggcccaggtgggtggatcacttgaggtcaggagcttgagaccagcctgggcaacacggtgaaaccccacctctaccaaaagtacaaaaattagctgggcgtggtgatggatgcctgtaatctcagctacttgggaggctgaggcaggaggattgcttgaacctgggtgggagaggttgcagtgaactgaggttgagccactgcactccagcctgggagacagagcaagattccatctcaaaagaaaaaaaacgtagaatttgaaaaggcattttatctctcattctggcaatactaaggaacaggatttgaagaagcattcacagctaagaatttacgctgagatcttataactttgcccataaatggatccatagaatcagaggggtatgatggatcaatacatgctgtgaaagtcttaataattttccatgagaggaaacacagccataatcagaaaatttgacaactctactgataatttgatacatgatgtcagtaggatgtcttttgtgaatgcttaaataattttaattgataattatgatgatgaggttaacaatgttttagtctggttaaagtgtaataccaatacatagtaaagagaacttaaccctagtatgtaaatgcgcttaataaagaaacggtttgatttttcattttgtactctgcctactgggtgtgtgggtggggaggattaaaagattaaactatgattatatacagtatatatgttcaaaatctggatcccaggaatgtgatcttttttagaggacttaggagttcttttagtagtatttctgctctccaagttctgacatgaacagcctcctgtggaatcagtctcattaaaatagagagctatataaatatgaccagatcgtacccctgggaagcaaatctccaaatcaggagagaaaggtggccaagtaaatccaactaaaagtgtgtcccttgaagtttaccttatattctcactctggtttctcttggttcacctgtcaatttggcccaaatacaaaaaaagaaaaaaagaaaagacaagaaagagaatttccttagcttttttttttttttttttttttttgagatggagtcttgctttgttgctagactggagtgcagtggcatgatctcggctcactgcaacctccacctcctgggatcaagtgattcccctgcctcagcctcctgagtagctgggactacaggcctgcacaaccatgtccagctaactttttgtattttagtagaggcgggttttcaccatgttggtcagaatggtctctatcttctgacctcgtgatctgcccgcctcggcctcccaaagtgctgggattacaggcatgggccaccacgcccagcctcagctctcttcaccacagctaaaccaatctagaatttctaagtgaactttgctaaaatctaaaggagaataaaaatgaaattattactatattatggaaaatataagcaacaccgataactttattcatttgctcagcttctcttctccatttacattcttccaggaacaaacttccatccccaaggggagatataaatttgcaggcaacctgcctagtttccttccctctaggctctctttctttctctgcacagtaaggtcatttttctgtcttattattttttttctttttagacagggtcctgctgtgtcacccaggctggagtgcggtggcacgatcctcccacctcagcctcccgagtagctgggactacaagccaccatgccggctaattttatttatttattttgtagagatggagtcttactatgctgcctaggctggtctcaaactcccaggctcaagtgatcctcctcagcctcccgaagtgttgagattacaggcatgggccatcatgcctggcccacttttctgtctttcacatggccgccacaagcctgtcccagtcacagccaagactaaaagccccacttgtcctctgtccccattcttctggttagagggatatggcatagtccgggtcaaactgcgggactatggtgactgtcctaatatatgagctgcttcttcaggtgagactcactctttacacgtgttgggaaggtcatcaccggcccactgtcaggccactccttgcagtccccagagcattcccgaaagaactgcccaacacagcgttggggacatggggaaggaatgtgcattctctcatgcaagtatttccattcacccatttacaagtaggtctcctgtaaccaggccatagttactgactgaataaaaaggtctttgcaaaaagactttccgtacttcctgtcagtctccttaacctttctcaaatacaaatttaattctgttcatccctcaggaccgtgtttaacatgctttagtgactattgctttaaaagtaaagttcaaacaccttagcattgttgtaaggtcctttgtaatctaacccctatctacctatttagccctatgtccattctgaactatttgcagcatcgagaacatatcatttatcccacagctgtgcttttaaataagtttcctccttctgaaataccctgctttccaatatctgctagccctcaagactcagctccagggtcacctcctctggtgatctttatcctgaactttccaagctgaacgagttccttcttcgtacccccaaagtacactggatgcccctttcattgtagcagttactcaatgggctgtgaatattggcttagttgtctatctccttgactagctgagaggtctttgatggcaggcactcagaaatatttctgaatgaatgagtgaatgaatgaatgaatgaatgaaatccaccctccccctgcatatgaagcctttacaaacaaaaacttacttgagtatggccatttttccactgagtgttataacatatacagacaggacctttcctctatagtgttttactacgagtttcattaaactttagaaggtcattaacttaggatttcagaaacttacaaggacaaggttatgaacacaaagttcttgtatttatttccatgcattgaaaaaattatttcatactttcatgtattaaaaaattatttcagcatctctatataattattttacattttgaaaataacagttgcaagactactaattgatgttgatgtctcatgagttaaaaatgttccaggatgggccgggcgcggtggctcatgcctgtaatcccagcactttgggaggccaaggtgggtggatcatgaggtcaggagatcgagaccatcctgactaacacagtgaaaccccttctgtactaaaaatacaaaaaaaaaaaattagccaggcatggtggcgggtgcctgtagtcccagctgctcgggaggctgaggcaggagaatggtgtggagggaggagaatggtgtgaacccaggaggaggagcttgcagtgagccgagatcgtgccactgcactccagcctgggcgacacagggagactccgtctaaaaaaaaaaaaaaaagttccaggatgaatctttgtatttgatatattacttcctgattcactaacagaatggaactactcaatctgacttctgttttcatgttgtgagagaataagttcataaccgctatacaagtttaagcatttaggtttgttactgtgctgacagtttgtgtacagaaatcacaaaatatttaccaaatattataaagagggctacagcatagaaaacactgctacttgttatgagggagagaatgaataaagatgaatcagatatgtaaactgcaaagttcttatcaactattaagcttcttctagctccatcttgttcatctttgtaaaagcacatattcctgtattcacacctgcattctatattcagtgactatacttagcacagaattcttggggcaagattctagctaagtaacaagcagctgacctgaaatacacaaacagtgagtgaatagagggtggcactctctgtacacatttgaagacattcagagtcaacgggctaagcaatacaaagaaggaagaaaaaaacaaacagacaaaaaaaaacaaaaccaagcatttcattctcctctgctctatccccaagaaaaccaagaaatggtattacttagagtcggacgggctctcttgttgcagccagttctttttatctgagactggatctattaggcctgatactttcagactctgagcaatttattttactttatctcgtacatattcaatggttgttatatttaccatcatgaagaatgttttggttatgctttcctgcctgtttatgcatgtaattaacaatataatgaattctgtggttcggttgccagactttgtttccagaggctgaaatataccacagtggttccagaatccattccagggtggttttccctccttgtccccgcaactctgtgagtatacagctgggcagacaagcctgactcatagttcttttgaggaaagaggctccaacaggttctttcctgtctaagctgcagtctcagtgcagggggttttgttagtgaaaacaaactgcctttccagccacaggtgattggggtcaggacacaatgggccaagcagccctgtgtgggctgcgcatgagaagaccagccacgtctcaggaggcctgagtgtgagggcctggggcaaactctgcccactgaggattctaaacccggtggtggcaggtcaaaccatatttccccacttacaggagaaatgcactgagtgggccaggcgcagtggctcatgcctgtaatcccagcactttgggaggccgaggcaggtggatcacctgaggtcaggagtttaagaccagcctggcccacatgatgaaaccccgtctctactaaaaatacaaaaattagccaggcgtggtggcgcacgcctgtaatcccagctactccggaggctgaggcaggagaatcacctgaacctggaaggcggaggttgcagggagctgagatcacgctcactgcaacaagagcgaaactccatctcaaaaaaaacaaaataataatgataaaaaagaaatgcactgagtgaacaaagataaggcagctcagggacccacagcctggggtctgaacagtgctgagcaccttttccggttctctgaggggctgactcaacctggctgttgaaggggtgacctcctgtgtgcactcatgtcatggagttctttgccgcaaccttgccacagccactgaaggtaccactgctgtctcctgttggcctgctcagaggttctctctagatttctgctctattaagttcaagctccagcccaggggagagccgccagcctcagagacaccacagcccctttcttaattatctgtttctaaaatagcaaacaggctgtgtgagtggagagagacagaattatgtttattaaattataatttatatacagtaaatgatgtacatctttttcagggtacaggtctagaattttgactaacacacagttgtataatcaccaccataatcaagatatagaacatttccatcaccctaaaaattcccttatgtccctttgtcattaacccctccctctgtctccagcctctggcaaccactgatctattttctgtctctgtggttttgccttttcccaagtgttgtattaatgacaaggccttcattaacatccttatttaaaccaacatgtgccctgcccaactttctgctggcacatctcaccctcatactttgcccgatttttttttcaggacacccacaataactgaaaataaattattatttacttaattactctctctcattggaatgtacgctctcactagaatgtgagcgtgagaaccttgcgtgcttgctgctagatctccagcgttcaggacgctgcctagtgtcttgttagtgttgggtaaatattttttgaatggaccacaaaatgaatgaggatactggaatttccggggaccctctccatactcaggtagaccttgttaaaaagagattatttttccccacaaaaatgtgttaatctaagaattgctgtgttgccaaagtagatgattatctgccagtaacacaattaggggtaattaggggccaagagcggtggctcacgcctgtaatcccagcattttgggaggctgagtggatcacttgcgcctaggagcttgagaccagcctggccaacatggcgaaaccccttctctaaaatacaaatacaaatacaaaataaatacaaaataaaaaatacaaaaattagctgggcctggtgatgtgtgcctgtagtctcagctactcaggaagccgagttgggaggattgcttgagcccaggaggttgaggctgcagtgagccttgcttgtgccactgcactccagcctgggcaaaagagcgagaccctgtctcaaaaataaaaaaaagaaaagaaagataagtagttaggctgatccaggttatggattgtcttttaagtttactttctggctgattaggttacctagaatagaactggcctgaagtgactaacatggaaataatgatagtaactatttcataaggtggttacaacaattaaatgttacaaattaggttcagtgtttactgctcagatgatgggtgcaccaaaatttcacaaatcaccactaaagaacttactcatataacctgttccccaaaaatctatggaaataaaaaaaatttttttaaatgatctaatataagtgaagcgtttcatgcagtggttctcacctgggagctgttttgtcaccccagggacatctgacaatatctggaaacattttttttcttttgtttgtcaaaactggggcggggaggccaggtgtggtgttcatgcctataatctcagcgctttgggaggttgaggtgggatgattgcttgaggccaggggtttgagaccagcctgggtaatatagtgaggccccatctctacaaaaatttaaaattagccaagcccggtggcacatgcttatcgtcccaactattcaggaggctgaggtgggaggattgcttgggcctgggagttcgaggctacagtgagccgtgatcatgccagtgcactccagcataagtgatagagaccctgtcttttaattttgttttttttaattaaaaaaataaaaactggggtggagagggctgctactggaaccagctgttgaacatcctacaatgtacaggatatcccgcacaacacagaatgacctgtcccaaaatatcaatagtgccaccagtgagaaaccctgggttagtgcagcatcaggcacatagtaaaaactgtattggtgtttgctatgattattattttataagtggcccttcttgacaaatgttcccacacagtctgacagtggaggtataatggagtgttgggttgagagttaggtttgacacctagcttcaccctttattaactatgtgacttttgagcccttacttgacttcgctataccccatattctttgtctatccaattggaataacagcaactccctgagagagttgctggggaattggataaaataattcatacaaaacattcaacactgcagtagcacatagtaaatgttcagtaaatgccatcgattgttgctgctgctgttgatccaataaagacctttccacagaatatagtgaagggatagaggacagtttcaactaggaaaaaaaattactcatataaagtatataaaagcgtatatttcgtatattaataaatatgtagaagttaaatttaaactatcctttttaaggctgctatttataattttctaaaaagtatattgcttttgctttcctagggtagagcacctccttgatataaaagatcctctcaattttaaacatttgtatctaacacagaatgcataattatttaattaagacgtttggtcttgattagaaatagaaacacattaaagtatttttgagaacctggatctcagatatgaaatataagacttaggaaagttaaacactagcgtagtagcaacaacctcttgtgtttgagattcgttaatctcttattccttcattgaaataggaaggagaagcttgcagtgggtaagtaattgcagatttgtagccatttctagcagttcctagaatcccctttataatctaatatttgtgttttaaaaaaataatctaatatttgtaaaagtgctttggaaattgtaaaacaaaactatggagatgtgggccattagtattatcatcaaccctaacaggatgttagagagtcagatgttgccacttcaagggagatgaccgagttttggtgcatttcaggaagccaaaatcaggctgcaagtaaactttgtatttaagaataaatgagaccgggcttggtggctcacgcctgtaactgcagcactttgggaggctgaggtgggcagatcacgaggtcaatagatcgagaccatcctggctaacatggtgaaaccccgtctctactaaaaatacaaaacattagctgggcgtggtggtgcatgcctgtagtctcagctactcaggaggctgaggcaggaggatcacttggatctgggaggcagaggttgcagtgagccaagattgcaccactgcactccagcctggagacagattgagactccgtttcaaaaaacaaaaaacaaaaacaaaagaataaatgattaaattgataaactatacattatttcgtgtaatattagaaatacaatgaagaactgtgtttctctgcataaaacttttaggtacgtgttttatactctgttacaaaatagttgggtggaaaaactcccaccatatacaaaatgaaaaggcaaatgacaacctgggaaaaatgtttgcaaaacatatgcaaagatttcatattcccaatagagaaaaaagtcttatagatcaacaggaaggatataaatgctgcaataaaagacatgaacatgcaattaacaaaagaaattcaaattgccagcaaatattaaaaatgtttagaattactgtcaaccaaacaaatgcaaattaaacaatacttttttttccttttaaattggcaatggttaaaatgtttctatcttctagatgtactattttctgaacaccagaattcagcacagcacctggcaccaaacaggatcgacaatcatttaataagtaaatgaatgagtcatgtgcatgcaacctagacatgactgacattcacccttttatttctttctctcttgagaagggatctcactctgtcacccaggctggagtgcagtggcctgtcatggctcactgcagtctcaaatttctgggttcaagtgatcctcagcttcctgagtagctgggactacaggagtgcaccaccacacctagctatattaaaattatttttgtagagaggagggcttgctctattgaccagtctggactcaaactcctgaactcaagtgatccttctgccttggcctcccaaagtgctgggattacagatgtgagccacttcgcccagcccaccgttttatttttgtgagtatactgtgggtttatatttataaattgggtggggagaagatccccttgcttcttgagatcatttatttacctttcttgcttagaaagacaaataaatggtctgaaagtgcttatttggggggtagtttttttttttttaatgggaagtgactcaaaagtgaagtctcagttcaagacctttttttttttttaagtcttactcaaaaggaagtgagtatgaggtgaactgcattaacctaaagtgctgcagagataaacttaaagcaggaagcaacataccatgaatgtactgcaagggaacacatttgtgtcatgtgaagagacatgacaaaaacagccctccttaaattatttgtggcaatagtgatcacattcattttaattttgccggaatatttcaagacaccgaaaggtgagtatataattgtaatctagctttcctttcttaatttaaaaaaattagtgtcagctagtggttacagaaaagatcctctttttggacacatgctgcataggctgaagttctagatctgaaaaactaataaaacaagattgcaattttagttgactgttatatagtacagtaacctaattcatagtacttaattatcatagcatacctaaaaatgaaaatatttaaaatctgtagtctagatttcagacattgagattacaataattgcatcatgattttgctctttgaaacactttcttcaaagcagtttttttttagttttttttttttttttttttttttgagatggagtctctgtcgctcaggctggagtgcaatggcctaatcttggctcactgcaacctctgcctgccggattcaagcaattctcctgcctcagcctccgagtagctgggattacaggcgcccaccaccatgcctggctaatttttgtatttttagtagagacacggtttcaccatgttggccaaactggtcttgaactcctgaccttgtgatccacccacctcggcctcccaaaatgctgagattacaggcttgtgccactgtgcctggcccaaagcagctttaagtatgctttttacattttggaattctttaatgaagaaagtgatatttattgtgttaaaaatgctagaattccctttactacaactatttcacacagataacttaccgtcaccttttgacaagaaaaagcgtttatatattttgaaaatacaatcaaaataaggtgagtggaaatttaaacagatgtatgtgtatgtatttgtaactggagaaaaatggaacaaaattaactttgtgaacgtttcagaaaattgtgatataattgctgaaacctagattaggaaaataaataggtataaatttaaactattttgatgttagcaaaggacttgaaaatttattaatgtgaggttcaaatggtaattgtgctccctagcatttaataagaagaaaaggtgaaaagaaaaggctgtattctatcattaaatagtctttatatgaatttgattaaaatcagagaaaaactcatatttgattatttgctgcaatgaatatttattgttgcatatatgtaatgctaaatagccagataaaaatatttttgctaattatatttgatgacatatttcagtgattatttgatgttgcatttacatgatgctaagtagcgagttaaaaatatttttgctaaataaacactatgactacaatttggttttctggcattatgttacttagatgaagcaatcatagcacatattttcagtgcttgattccactgggtgaaaatgtgttataaagagaatagttagaataaagataatctatttttaagatattgtgggctgagagtaagctcatttaatagttatccggagtaggttctatctatatatctatctagctagctagctagctatcgatctacacctagcacctcttaaaaatcaggttggatctaataaaaaccaggtaatcatcccaaaaatgacttaattaactattggttagtattttatgagaactggtgactacaggagcatgttaaaggttttcattttggggcagacatgtagttcttttagtttttgtttctcaaagtgagaagcatggccttctggggcagtggtgagcagaaagaagatagatgaagcacagagaaattcttagtgggggacagatgggagccccttctattggtaggtagaagaaagagctcttataaaatccatcttagccaaacttccttggcctaatagtaatgtgtcagttcttcttcatcttgtcaatagtcaaccatcatttataatgatgtttgttctcttgctttcaaaactggttatatcagctcccaatactacctttactgccttcccaaacttaaaatggctgtttctcttctcctggtccaagaacagcatagataatgctccaaactctttctgggttgatgggttgtttttttttttttaagagacagggtcttgctgtgttgcctaggctgactcctgggctcaagcaatcctcctgcctcagtccccaagcagctgggactacaggcacataccaccacactcaggtggatttattggggaattttgtttcaaaggaaccctacttggggccaacaaacaaaaatgttcaaaaaccactgtcttcttttacattannnnnnnnnnnnnnnnnnnnnnnnnnnnnnnnnnnnnnnnnnnnnnnnnnnnnnnnnnnnnnnnnnnnnnnnnnnnnnnnnnnnnnnnnnnnnnnnnnnnnnnnnnnnnnnnnnnnnnnnnnnnnnnnnnnnnnnnnnnnnnnnnnnnnnnnnnnnnnnnnnnnnnnnnnnnnnnnnnnnnnnnnnnnnnnnnnnnnnnnnnnnnnnnnnnnnnnnnnnnnnnnnnnnnnnnnnnnnnnnnnnnnnnnnnnnnnnnnnnnnnnnnnnnnnnnnnnnnnnnnnnnnnnnnnnnnnnnnnnnnnnnnnnnnnnnnnnnnnnnnnnnnnnnnnnnnnnnnnnnnnnnnnnnnnnnnnnnnnnnnnnnnnnnnnnnnnnnnnnnnnnnnnnnnnnnnnnnnnnnnnnnnnnnnnnnnnnnnnnnnnnnnnnnnnnnnnnnnnnnnnnnnnnnnnnnnnnnnnnnnnnnnnnnnnnnnnnnnnnnnnnnnnnnnnnnnnnnnnnnnnnnnnnnnnnnnnnnnnnnnnnnnnnnnnnnnnnnnnnnnnnnnnnnnnnnnnnnnnnnnnnnnnnnnnnnnnnnnnnnnnnnnnnnnnnnnnnnnnnnnnnnnnnnnnnnnnnnnnnnnnnnnnnnnnnnnnnnnnnnnnnnnnnnnnnnnnnnnnnnnnnnnnnnnnnnnnnnnnnnnnnnnnnnnnnnnnnnnnnnnnnnnnnnnnnnnnnnnnnnnnnnnnnnnnnnnnnnnnnnnnnnnnnnnnnnnnnnnnnnnnnnnnnnnnnnnnnnnnnnnnnnnnnnnnnnnnnnnnnnnnnnnnnnnnnnnnnnnnnnnnnnnnnnnnnnnnnnnnnnnnnnnnnnnnnnnnnnnnnnnnnnnnnnnnnnnnnnnnnnnnnnnnnnnnnnnnnnnnnnnnnnnnnnnnnnnnnnnnnnnnnnnnnnnnnnnnnnnnnnnnnnnnnnnnnnnnnnnnnnnnnnnnnnnnnnnnnnnnnnnnnnnnnnnnnnnnnnnnnnnnnnnnnnnnnnnnnnnnnnnnnnnnnnnnnnnnnnnnnnnnnnnnnnnnnnnnnnnnnnnnnnnnnnnnnnnnnnnnnnnnnnnnnnnnnnnnnnnnnnnnnnnnnnnnnnnnnnnnnnnnnnnnnnnnnnnnnnnnnnnnnnnnnnnnnnnnnnnnnnnnnnnnnnnnnnnnnnnnnnnnnnnnnnnnnnnnnnnnnnnnnnnnnnnnnnnnnnnnnnnnnnnnnnnnnnnnnnnnnnnnnnnnnnnnnnnnnnnnnnnnnnnnnnnnnnnnnnnnnnnnnnnnnnnnnnnnnnnnnnnnnnnnnnnnnnnnnnnnnnnnnnnnnnnnnnnnnnnnnnnnnnnnnnnnnnnnnnnnnnnnnnnnnnnnnnnnnnnnnnnnnnnnnnnnnnnnnnnnnnnnnnnnnnnnnnnnnnnnnnnnnnnnnnnnnnnnnnnnnnnnnnnnnnnnnnnnnnnnnnnnnnnnnnnnnnnnnnnnnnnnnnnnnnnnnnnnnnnnnnnnnnnnnnnnnnnnnnnnnnnnnnnnnnnnnnnnnnnnnnnnnnnnnnnnnnnnnnnnnnnnnnnnnnnnnnnnnnnnnnnnnnnnnnnnnnnnnnnnnnnnnnnnnnnnnnnnnnnnnnnnnnnnnnnnnnnnnnnnnnnnnnnnnnnnnnnnnnnnnnnnnnnnnnnnnnnnnnnnnnnnnnnnnnnnnnnnnnnnnnnnnnnnnnnnnnnnnnnnnnnnnnnnnnnnnnnnnnnnnnnnnnnnnnnnnnnnnnnnnnnnnnnnnnnnnnnnnnnnnnnnnnnnnnnnnnnnnnnnnnnnnnnnnnnnnnnnnnnnnnnnnnnnnnnnnnnnnnnnnnnnnnnnnnnnnnnnnnnnnnnnnnnnnnnnnnnnnnnnnnnnnnnnnnnnnnnnnnnnnnnnnnnnnnnnnnnnnnnnnnnnnnnnnnnnnnnnnnnnnnnnnnnnnnnnnnnnnnnnnnnnnnnnnnnnnnnnnnnnnnnnnnnnnnnnnnnnnnnnnnnnnnnnnnnnnnnnnnnnnnnnnnnnnnnnnnnnnnnnnnnnnnnnnnnnnnnnnnnnnnnnnnnnnnnnnnnnnnnnnnnnnnnnnnnnnnnnnnnnnnnnnnnnnnnnnnnnnnnnnnnnnnnnnnnnnnnnnnnnnnnnnnnnnnnnnnnnnnnnnnnnnnnnnnnnnnnnnnnnnnnnnnnnnnnnnnnnnnnnnnnnnnnnnnnnnnnnnnnnctgcctagtcttactccattcgtttcttgtccttttttttcattttttctcatgttctattcactttaatttctaagataaatattataaaataatttttacttataaattattcactgataccctgtctttaacatgtgaaatgaattcaaaaggaatcttaatgagaaataatatactcatgatgtttaatagatttgatttcgaaataataagccctctgaagtcctaagttaaaaataaagcaacttgtttgataatttttcatcaagaatgtatctgagtctctgagtaattattagtaggaatattccattatcacaattacacagtataagctatttagtctaactttaccaaaaaagggagctacttcaacactgtgtgagacttttaatgggtttgcattgggtatgcactattagcaagataacctattttacagcagtgttttttaacctttccatttatttgaaaggcagctaagatatagtagttaatataatggtttgatgcatttatattacatgtagataatggagatacaaaagggagtggtggatatattttgattcagagcttcttgcaattaagggagctagcttactcccaaataagaaactttccaacctgtttttgttggacttacagtgtttaagacagaacttggctaaccctcatgtaaatcccagtgatcttttatttatttattctttcacctgtgctagaaacctggggctacaaaaaggaaagacaactctttgatcaaggagttttcagtcgggaggacaactgactggcaaacaactaaataaaatacaggaattaactgaaacagggatgtaaacaagatgcaatggaaacataagtattgcttccacgtcagtctttgggaggacgttccttgtatttccatttgcaaagagaaataaataattgtcagagttcaaatgatcacctagtattccttcttacctgcttgcaaaagcacttttcaagagaagaaatgatgacgattattaaataaaatattctcatatcagtatatcaatagttcctgaaagtggcaattgcagtgagtcacacaagtgtactcccagtgatttgtggcaatacaggataagaatagcacagatgaggctgggtgcagtggctcacgcctgtaatcccagaactttgggaggccgaggcgggtggatcacctgaggtcaggagtttgagaccagcctgaccaacatggtgaaaccccgtctctattaaaaatacaaaaaactagctggggccaggcgcggtgtaatcccagtactttgggaggccaagctgggtgggtcaattgaggtcaggagtttaagaccggcctggccaaaatggtgaaaccctgtctctactaaaaaattaaaaattagccgggcatggcagtgcacacctgtcatcctagctactctggaggctgagacaggagaatcacttgaatccaggaggcggaggttgcagtgagccgagattacaccactgcactccagccttgtggacaaagcgagacttcttctcaaaaaaaaaaaaaaaagaaaaagaaaaaagacagaaagaaaaaggaaaattagctgggcatggtggtggcatgtgcctgtaatcccagctactctggaggctgaggcaggagaatcgcttgagcctgggaggcagaggttgcagtgagctgagatcaccccattgcacttcagcctgagtgacagagcaagactccgtctcaaaaaaaaaaaaaaaaaaaaaggaatagtatagatgaaaacacctcagacctaattttatctgttttgacttcctcactttcttttaagagccaaactgacataaactctgtttaccagctttcatttccccttctctttcacgctttgtgaaggaaatggtggtataatgaacagtgaaattgaagaaaacaaaggataaagcaactataggataaactgacataatatgagcatatgttcacagtgtttaagtctatattataatgaccaccacatcaagggtaattgcaattaatttcctgaaagtgttattctagttctcaaaaatgaatgctctttttcttattcataaatatttaatcagtaatccccaataaggccttatgactatttaaacaatttttttattttaacaaatacatttacatgtgccagtaatatgccaagtactttgacatatattttacaaaataataattcacagtaatgtgtcaaatatttctactcattcatggcgcagcatcattctcaagagagaatgttctgaaaatctttagaaagaaggaataaaactagatggataaatgtactttgtggtaagattttgcttctttttaaaaatttttatttatttatttatttttgagacaacagcttactttgtcacccaggctggagtgcagtggcgtgatctcggctcactgcaacctccaaccccagggttcaagccattttcctgcctcagcctcccgagtagctgggactacaggcacgcaccaccatgtccagctaatttttgtatttttagtagggatggggctttgctatgttggccaggctggtcttgaactcctgatctcaagtgacccacccgcctcagcctcccagagtgttgggattacaggtgtgagccaccacacccagccagattttgtttcttattgaattttctgaatcattacaattttaaaatggccactaatggacacaatattttcatatatatattttaggcactaggtgttggcaaaaaaatgtgttaaatataacgcttttcatcactttgacagaactggctttattctctaatctgttaggttgcaatacctaccaacaatccttgcttagggtgctttctaactgcttgtctcattgttttggtggataaatgctcccttagtatatctcttttgctttttaattttttaaaaaaattttttaagagagacagggtcttgctttatggcccaggctggactccaattcctgggttcaagtgatcctcccacctcagcctcctgagtagcatatcttttttgctttaatagaaaaaaaagactttctctaaaacattcatatggtgatatatcttccccttacactgttctgtttcttttctcctatcacttatattttatcacctatatgatttatttattatgcattttttaaaattatctgatttctccaaatagaatgtaagctccatgaaaccgaggttttgtctgctttgttcactgatgtgtttcaagcaattaagagagtgtctgtcatattaagggcactcaatgaatatctgttgagggagcaaacttgctgaatcatactgttaaggaaatcaaaagaaaaccttgaaggaggcatttctcatctgacgttcacaaacatcttgtgatttaggcaggccaagtgttatcctcatatttttgaaagattaaatttcatcacaaacctagagattttaagttgtgctagcgtgtgaaatttattttgcagaatattttacttgaaaggtatgtgtctttttaccctgagtcattttcctgccattttctttatctacagggaatttcataatattcatttgcttctcttattttgacaagtaaaatgagcagtctcctatgtctcaaacctgcctttcaaatattgctatggtatgtcgaaagttatcccaaactttgctccctgcctccagcaaacatttcaaatggtctttcccaaatatcctatgaataaatccgtagtcccttgctcctgatctggctgacactacagatatatcacccatacacaatatgatatgtttttccctcttttctgctcaatattaccagagagccttcaatgattggcctccaaattgaaatataatctagtttttgctattgaagtggataatctttttgagtttattccaatctttttttttttttttttttttttgagacagtcttgctctgtcacccaggctggagtgcagtggtgcgatctcagctcactgcagcctccgcctcccatgttcaagcgattcttctgccgcagcctgccaagtagctgggattacaggcgcccccaccacgcccggctaatttttgtatttttagtagagacagggttttgccatgttatccaggctggtttcaaactcccgagtttaggcaatctgcccacctcagcctcccaaagtgctgggattacaggcatgagccaccgcacccggcctattccaactgttaaagaaggcagacctgtgaccaaaggaaaacatcatatgttaatgaatgtctctgtaaattaggcagctaaaccataaggtttctcctatcctgacagctaatatttttaaattgctgaattatgctatagaataactaataatgtgaaagatttttagaaataatcgactatgtttttaacaggcataatttacatacgataaaatggaaagatgttttttaaaaaacttttattttaagctcaggcctacatgtgcaggtttgttatataggtaaatgcatgtcactggggtttgttgtacagatgatttcatcatctaggtattgagcctagtacccattagttatttttcctgatcttctctctccttccaccctctaccctctggtaggccccagtgtctgtttttcccctctatgtgttctcatcatttagctcccacttataattgagaacatgtgatacttggttttctgttcctgtgttattttgctaaggataatggcctccagctccatctatgtttctgcaaaggacatgatctctttcttttttatggctgcatagtattccatggtgtatataataccacattttctttatggaaagatcttaagtgttcagtttcatgaattttgacattcgtgtgcacctgtgtaactactatcacataccagatacagatttacatctccccagtaaagattcctctggctcggctgggcatggtggctcatgcctgtaatcccagcactttgggaggccaaggtaggcagatcacaggatgtcaggaattagagaccagcctgccaacatggtgaaaccacatctctactaaaaatacaaaaattagctgggtgtggtggcacgcgtctatatccccagctactcaggaggctgaggcaggaaaatcacttgaacccagggggcggaggttgcagtgagccaagatggcgccacttcatggcagcctgggcggaacagcgagactccatctcaaaaaacaaacaaataaataaacaaacaaaagattcctctggctctttcctttcaaatctcctccagcatccccaaggcaacatctgacctgtgtcaccataaattggttttgtctcttcttttattttgtgtaaatggactcatcacacagtaaatatttttggtctggcttctttttttatttttattttttattttttaaacggagtctcactctgtcacccaggctggagtgcagtggtgctatcttggctcactgcaacctctgcgtcctgggttcaagtgattctcctgcctcagcctcctgcgtagctgggactacaggtgcccaccaccatgcctggatttttttatttttattttttgtatttttagtagagatgggtttcaccaagttggccaggctagtcttgaactcctgacctcaagtgattcgcccaccttggcctcccactgtgctgggattacaggcgtgagccaccatgcctggcctggtctgggttctttacttagcatgtttttgagattcatccatgctactgagtgatttagtagctcctatctttttgttgcaaagtactccatcatataaatacacaacatttgtccctttatctattgggttatttcaagtttgggctattataaatatgctgctatgaacattattgtacaaatgtttgtgtcagtatatgtttttatttctattcaataatgctctagttgtggaatacctgggtgtcttagtcagcttgggctgctgtaacaaagtgctgtagacggagtaacttgtaaacaacagccttcacagttctggagtttggaaatccaagaccagtatgccagcatggttgattctgatgagggtcctcttctgggttgcagaatgctgacttttctttgtattcttacaggatggactagttacctctctggtctcttcttataaggacactaatcccatccattagctctccactctcatgacctaattacctcccacagaccccaccttcaaataccatcatattggaattttaggggtacacaaacggttagtccatttcactgggtacgtttaattttacaagaagctgacagatgtttctctaaagtggttgtactagcaatatttctagtagcaaaaaattctcattttctctagtttatatttaatatactgaattaataacacttagaatatgtatagtcaaagaaataatctacatttcttccaaagttccctgacaactagttaatgaggtcttgggaaaatgtgagttgacctagagtagcctctggtgtgcctactatctgtcaaataatgaagattttaatttacattaaaattttatggaaagatattctacaaataagttttcacttattggtagaggtcaacggatagttgagatttcttttcttgcagtcatactctgaaaaatactcctgggacaaaatatctaaaaatgtgaaataaaatgtatttaaaactttagaaatgtagagttaaactgataagacaataagactccttggaggcagaaaatgagtaggaattataaatacgtatggctaagcaagagtgaacaaatttgtgcctcaggagcatttgcaaatctctggtggcctggaatttcagtttcactgggtcatacgtcaggagacagaaggcaaagtgtaagactgagatatgactgagatactaaaaagtgatatgctccataaaacagtaatctagcacaaattatgtctggttttgaggaaatttgtctgtcttcactttggctatgggtggagaaaggaaaaagagtcctttgagagtttataaacacagttggccataacttggatgttgagaatcattacctgtgacgtgtgaaaagtccaatccaggaatgtagttaaagtcactttgggttaatggtgccattagacactcaccagaggaaaacaccaatcctctctggaggaaaacatctttacaccattcctcaaataatttcccaaagtaaaattccaaggaacaatagctattatcaaaaatgataaaacacgtgaagactcaatggacaagaatcaacagaaacaacaaacagcagaatcggatcttcaaagaattccgatattggaattatgagatataaaatagaaaatatttagcttgtttcagtacagaaaatattacatcaaaaagtatgagtaagcacagaagaatgtaatcagactcatttcacaccatgtacaaaaaccaattcaaaatggattaaagacttgaagacctaaactgtaaaactactagaaggaaacatagggaaaaatatcaatgacattgttctaggcaattatttttttggttatgacccataaaacaggcaacaaaagcagacatatacaaatgagattgtatcaaactaaaaatcttctgcatagcaaaggaaatgagtgaaaagaaacttacggaatgagagaaaatagttgcaaaccatatatataagggtttaatatccaaaatatataaggaattcagacaatgcaacagcaagaaaataacctgatttaaaaatgggcaaaggatagtgaagagttatttcttttttacttttttcttttttcatttttttcttttcttttctttttatttatttatttttttttgagacaaggtctcactatgttgcccaggctggaatgtagtatggctcactgcattcttgacctccagggctcaagcggtccacccacctcagccccctgaatagctaagactgcaagtgtgggtcaccacactggctaatttttaaattttttttgtagagatggggtctcactatgttgcccaggctggtcccaaactcctgggctcaagcgatcctcctgtcttggcttcccaaagtgctaggattattggcatcaaccactgcatcaggctgacatttcttgaaagaagacatacaaatggccaatacatatatgaaaaaattctcaacatcgctaatcatcagggaaatacaaattgaaattttatgaaaatacagtgaaatattatctcacacccaagatggctattatcaaaaagacaaaatatagcaagtgctggtgaagatgtggagaaaagggaacccttgtatactgttgtgggaatgtaaaatagtacggccattatgacagacagcataaaggctcctcaaaaaattcaaaattaggctgggtgcggtggctcacacctgaaatcccagcactttgggaggctgaggtgggcagatcatgaggtcaagagatcgagaccatcctggccaacatggtgaagccccatctctactaaaaatacaaaaattagctggacatggtggcatgtgcctgttgtcacagctactcgggaggctgaagcaggagaattgctcgaacgggaggtggaggttgcagtgagccgagatcatgccacttcactccagcctggtgacagagtgagactccatctcaaaaaaaataaaaaaaattcaaaataagaactactaataaggcacaatgacatgcacctgtagtcccagttacttgggaggctgagttgggaggatcgctggaagccaggagtttgagagcagcctgggcaacatagtaggatcctgtctctttaaaaaaaagtagaactaccatatcgcccagcaatcccactcctggttatatttgaaggaaaggaaatcagtgtgtcaaaggatctctgaactcccatatccactgcagcattactcacaatagtccggatgtggaatcactctgaactcccatatccattgcagcattactcacaatagtccagatatggaatcaatgtaagtgtccatcagtgaatgaatggataaagaaaacgtggtacatatacacaagataatactattccaccttaacaaagaagaaaattctgtcttttgcaacagtatgaatgaatctgggggatactatgctaagtgaaataaaccaggcacagaaagaaaaatgccacatgatctcactatatatggagtcgtaaagagttgaactcacagtggcagagaatagaatagaatgatgtttaccgtggacgacagggtggggtgaggggaatggagagttgttggtcaaaggatacaaaatttcatttagacagatgaataagttctggagatctattgtatggcatattgactatagctaataataatggattatatacttgaaaattgctaagagagtaaatgttctcgccacacacaaacgaaaatggtatgtgagtgatggatatgttattaggtttgatttaatcacctaacaatatatatatctcaaaacatcacattgtataccataaatatatatataatttttgttagttaagtataccttaataaaacttggggaaaggcacctgaaaatatatgaagtttaaagcaaaatgtaaggtactgtgattgggaaaatagcaaaaatagcaacaattcgtacacacaaagttaatagggaggacaaacagagtcgtttattcccccagcctaaaaataatataaaacaaatatgtggggagatccaatgctctgccacattttgtgattctaaaaaacaatatgagcaaggaacaaagactattaaaagttaccaggcagatttgaaaaagaaccaactggaagttctaattgtgaaaaatataataaattagaaatgcaaggaatgaaatgaacagattagatgcaactaaataatgaattagtgaactggaatagagatctaaagaaattacctagaacatagcacagaagttaagagacatggaaagcaaagggagctatttctaatcaaagctgcaaaggatagaagaaatagaatagggtaaaggcaatatttgaagagacaatggctaagaaatttacagaatcattgaaagacgtaaatcctcaaattcaggaaacccacaaatcccaagcaaaataagtgatgagaaattctgcagagcatgaaaactgaagaggtttttttttttttttcttttttaagatggagtctcgctctgtcgcccaggctggagtgcagtggcgtgatcttggctcactgcaacatttgcctcccaaattcaagtgattcttctgcctcagcctcctgagtagctgggattataggagcccaccaccacacccagctaatttttgtatttttagtagagacggggtttcaccatgttggccaggctggtctcgaactcttgacctcaggtgatctgcccaccttggcctcccaaagtgctgggattacaggtgtgagccatcgtgcccggccaagagatctttaaataaccagggataaatgcagattgtctttaaaaagtttaaaggaacaatagtctgatagctcatctcttgaaaacaacaatgaaaatcagaaggcagtgaaaaatgcctgcaaagtgctgaggcaaaatttttgttgacctagaattggtgagatgtatattttcaggtaaacaacacagagagtttacaatcatcagaccctcagtgaaagaacttctaaataattagctttaggagaaggaatgtaatcccagaaggaagggcagagatgcaagaagaaatggcagggaaaaaaacctcaacaacaattataaacatgtgagtaaatctaaacaaatcctgaaaatattagatgcataaaatttaaaaactcaactaatttgtatgtcagtgaaaaaacaagatagaaccaaaatgctgtataaaagtagcatttaagtcaggaaggagatgatccgagttaaagtatcctaagacccttgtattgtttgagagaggttaactgttgattgactttaggctttaagaatgcatgttaaaaattactatggtaactactaaaataatagaaatatagtatctaacctcacataactaaagggaaaaataatggaatgagaaaaaaaaatcactgaatcaatttaacagccagaaaggcaagaaacaatagaaagcatggtacaaataggaagcattaataatatgatataattaaatctaaatataccaatgatcccagtaaatgtaaatgggcaaatctatccaggtaaaaagacaaaaaattatcagactagattaaaaaagcaatttccggaaatatgccatttaaaacagacctatctaaagcattaagataaaagtgaaaagatgagaaaaatatacggaacaaatagtaactgaagaaagcacatgccatggtattaatgtaagattttaagattaacatcattactagcaataaagaaggtcaggatatatggatagaagtttcaattcacaagaatatgcatcaattctaaatttatatgccccaacaaagatagctttaaaaagacaattataaatccattatttagtgggagattttaaacatacttcccagtcataaaatacaaccatgtgaagaataggaatatagacaattcaaacaattcaaatagctagttttatctaatggatgtatttagaatattgaactcaacatctggaacacatattcttttcagggaataaaaatacatacttgggctgggtgcggtggctcacacctgtaatcccagcactttgggaggctgagacaggtggatcacggggtcaggaaatcaagaccatcctggccaacacgatgaaaccccgtctctactaaaaaaaatacaaaaaaaattagccaggcgtggtggcgggcacctgtagtcccagctactcgggaggctgaggcaggagaatggtgtgaacctgggaggcggagcttgaagtgagctgatatggtgccactgaactccagcctgggagacagagcgagactctgtctcaaaaaaaaaaaaaaaaaaaaaaaagaagaaatacatacttgatatggtttggcagtgtccccacccaaatctcaccttcaattgtaataattcccacttgtcaagggtgggaccaggtggaggtaattgaatcatagggtggtttcccccatactgtgtcttgtgatagtgaataaatatcatgagatctgatggttttataaatgggagttcccctgcacaagttcgcttgcctgccaccatgtaagacatctctttgctcttccttcatcttctgccatgattgtgaggcctccccagccatgtggaacttaagtccattacacctttttcctttataatttacccagtctcgggtatgtctttattagcagcgtgagaatagactaatacaataccagactataaaaacaagcctcaatacatttcaaacaatctttaatatacttctctgactaaatgaaattaaattagattctagtaacaaaaagaaagctaaaaataggtaatatatttggaaatttagaaaattcacttctaaataacctatagttgagaagaaactataatggagaatagaaaatactgtaactgaatgattaaaaaatactatctgtttaaacttatgcaatattaccaaaacatataactttaaatgcttatacctaaaacatcagaaaaagaacaataagataaacccagaaagtaatggcaggaaataataaacacaggagcaaaagtcaatgaacttaaaagaatagatacagaaaggatcaataaaatcacaagttggttctttctttcttctttttttttttttttttaggcagagtcttgctgtgttgcccagcctggagtacagtgatgtgatctcagctcactgcaacctctgcctcccgggttcaagcaattctcctgcctcatcctcctgagtagctgggactacagactcacaccactatgcccggctaattttttgtattttagtagagatggggtttcaccatgttggctaggctgatcttaatctcctgacctcgtgatctgcctgccttggcctcccaaagtgctggattacaggcgtgagccaccacacccagccaagctggttattttaaaggactatttgtatggataaaccactggaaagattcatatgttaatgtattagtccattttcatgctgctgacaaagacatacatcatttataaacaaaaaagaggtttaatggactcacagttccacgtggctggggaggcctcataatcatggtggaaggcggaaggactttgtacttggtggcaggcaaagagggaatgagtgccaagcaaaagggggtttccccttataaaaccatcagatctcatgagactgttcatgagaacagtatgggagaaacagcccccgtgattcaattatctcccactgggtccctcccacaacatgagggagttatgagagctacaattcaagatgagatttgggtggggacacagccaaaccgtatcagttaatttcttagggctgctgtaacaaatgatcataaacttagtggcttaaaatgacacaaatgtattgtctcacagtataggttagacattcaacagaggtatccccgggctaaaatcaaggtatcagtaagactgtgttccttttggaggctctagactagaatccattttctggctgtttccagcttctggaagctgtctgaattccttggcttgtggcctccttccatcttcaaagccagcaatggcctgctgagtctttctcatattgtatcactctgacattgactcttctgctacccaattccacattcatgattacactggatccacccagataatccaggataatttcttcattttaagatcagctgattaacaacctgaattccatcttctgccttaattccactttgccatgttatgtaatatatttacaggttccaggaattaagatagggacacttattctgcctgccaaaactgaataataaaaaaaatgagagaaggtacaagtaactaatgttagaaattaaaaagggatataactacagacatagcaaaattaaagatgtaataagaggatattgtgaataatttatgtcaataaatttgaaacacaaagacacatatctaggaaacttacttaggaagcaatggaaagctcaagagttttacaacaattaaagaaactcagtccatggtttttaatcttctctgtttcagatgattttcacactagtttcagatgattttccaggcaattcctgccaaactttcaagaaacagaccaaacagataaatgtaattttatgtaatttttttcaaagcataaaaaagaggagacatttatttatttcttttttaaaaaaagatgaaaattttatttactgggaaattcttgctgatttttttttttttttttgagatggagtctcactttgctgcccaggctgtagtgcaatggtacaatctccgctcactgcaacctcagcctcctgggttcaagagagtctcctgcctcagcctcccgagtagctggattacaggtacacaccaccatgcccagctaatttttgtatttttattagagacagggtttcaccatgttggccaggctggcctcaaactcctgacctcaagtgatctgcccacctccgcctcccaaagtgctgggattacaggtgtgaactaccacacctggctcttgctgatttttgcataggggtgtgacaaaagcaacatcagaatttattgtgattctatctacagaaactggagaagatgatttcattggttcattaaacccctcaatgtcttctacctgcccttcctaacctttacattcaaaattatcttcctgcctatatatctgttagtcaatcatctttcttccattaagtttatgaaattcttcatgacatgatatggactttgacagtgctgtttttgatgtcgtaatacatggcagattgactcgtgataatatcacttatagcttattcaggggtcagtaaactatggtcttttacagcctcttttgtttaaaatggttgggaaataaagaatattttatgacataaaaattatattaaacttgaagtttagtatccataaataaagttttattggaatgcagccatactcatttttatatgcattttctgtggctgttttcatcctataaggtgagaattgtgtagttgcaacagagaccatatgacccacaaaggctaaaacatttactaaatgaccccttatagaaactaagttgcagaccatggcctatatatttacattacactacaattataaaatataagtatttgacagtatttaaacctttggatgaatgatcttacatagtgaaatgtataggtatatctacattacagatatatcctcttaatttttaccatttttcagttgactgttttagcttttttaaatacacacttttgtctgtaaataattataacaattggccgggcgcgatggctcatgactgtaatcccggcactttgggaggctgaggcgggtggatcatgaggtcaggagattgagaccatcctggccaacatggtgaaacccccgtctctattaaaatacaaaaaattagctgggcgtggtgaggtgtgcctgtagtcccagctactcgggaggctgaggcaggggaaatcgcttgaatccaggaggcagagttgcagtgagccgaaatcgtgccactgcactccagcctagcgacagagcaagactccgtcttaataaataaataaataaataaataaataaataaataaataaataaaccaattatgtcatactactctttttttttctttgttttctttttctttctttcttttttttttttgagacaggttctggctctgtcgcctaggctggagtgccgagtgcagtggtaagatctctgctcactgcagcctctgcctcgcaggctcaaaccatcctcccacctcagtttcccgagtagctgggactacaggcatgtgccaccatgcccggctgatttttgtattttttttatagagacgaggtctcactttgttacccagactggccgcgaactcctgagttcaagagacccacccacagtagcctcccagagtgctaggattacaggcgtaagccaccatgtccagcctcatactactcttttccaacacttccaagcattgtttccttcacttctttctttttttctttcctttttttttttctgagacacagtctcaatctgttgcccaggctggagtgcagtggcgtgatctcggctcactgcaacgtctgcctccctggttcaagcaattcttcctgactcagcctcccaagtagctgggattacaggcacctgccccacggcaggctaatttttgtatttttagcagagatggggtttcaccatgtcagccaggctggtctcaaactcctgacctcaagtgatctgcccgcctcagcctcccaagtgctgggattgcaggcgtgagccaccatgcccggtctatttttgtatttttactagagaccaggtttcaccatgttggccaggctggtctcgaactcctgacctcaggtgatccgcctgcctcgacctcccaaagtgctgggattacaggtgtgagccaccgcacccgaccttctccacctatttctaatcaatgttttctcctaattgctttggcagattttcctggcaaatatttatagggaaaatttcttgctttttcataactttgacataaatatttatagtgtttatcactaaaatatatttacatcagtatccttagtgctattgatattttggtctgagacagatagactttataatgtaagaatatttctcttttacaaagagaatatagtaatttgcaaataaatgtgatatttattacgtgattttgaagcatctagatgtagttcatattcttttagacccactgatgtaatgtatttcattaatatatttttaagtactatatcatttttaaattttagattcagagggtacatgtgcaggtttgttacatggatatattatgtgatgctgaggtttgggcttctaatgatcccattgcccaagtggtgaacatattacccaataggtagtttttaagcccttgcttccttccctcccttcccactttgggaatacccagtgtctgttgagcccgtctttgtgtctgtgtgtacccaatgtttagctaccacttataaatgagaacatgtggtatttgtttttctgtttctgcattaatttgcttgggataatggccttcagctgcaaccatgttgctgcaaaggacatgatttcaatcttttttatggctgaatagtattccatggtgtatacgtaccatattttcttttattattattattatttttgagatggagtctcactctgttgtccaggctggagtgcaattatgtgatgtcggctcactgcaacctctgcctcccgggtttaagcaattctctgcctcagcctcccgggtagctgggattacaggtgcatgccaccatgcctggctaatttttgtatttttagtagagatggggtttcaccatcttggccagactggtcttgaactcctgacctcgtgattcacctgccttggcttcccaaagtgctgggattacaggcatgagccaccactgatggattgattccatgtctttgctactgtgaatagtgctgtgataaacgtatgagtgcaggtgtctttttggtagaacgatttatcttcttttaggtatattcccaataataagattactcggtcaaatgacaattctattttcagttctttcagaaatctccaaactgctttccacagggcctgaactaatttgtatttccactaacagcatataaacttccttttctttgcaaccttgtgaatgtctgtgattttttaaataatagtcattctgactagtgtgaaatggtatcacattgtggttttgatttatatctctgtaacaattagtgatgttgagcattttttaatatatttgttggctgcttggatatcttgagaagtgtctgttcatgtactttgcccactttttaatggggttggtttttttcttgttggtttgtttcagttccttatagattttgtatattagcccttagtaagatccatagtttacaaatattttcttccattttgtaggttgtctctttactctgttgatagtttattttgcagtgaagaaaccctttagtttaataatgttccaattgtcaatttttgtttgtgttgcatttgcttttgaggacttattcataatttctttgcctaagttcatgtctagaaaagtatttcctaggttttcttttaggatttttatagtttgaggtcttacatttagatctttaatctacctttagttaatttttgtatatagtgaaaggggtccagtttcattctttgcctatggttagccagttttctccgcagcatttattgaatagagtatcctttccccagtgtttacttttgtcagcttcatcaaagatcagttggttgtaggtgtgcagctttatttcaggggtctctattctgttgcattagtctatgtgtctattaatgtttttgtaccattaccatgctgtttttgttactctagccttgtagtatagtttgaagttggaagatatgatgcctctggctttgttctttttgcttaggattgctttggctattttggctattttgtgtgtgtggtgggtgggtggttcatatgaattttagaatagttttctctaattctgaaaagtgacattggtaatttggtaagaatagcgttgaatctgtagattgctttgggcagtatggatgctttaatgatattgattattctgatccatgagcatgaaatgcttttttatttgtttgtgttatctatgatttctttcatcagtgttttgtagttctccttgcagagatctttcatctccttggttagatgtattcctaggtgttttatttcatgtttttttgtggttattttaaatgggattgcattcttcatttgattctcagcttgaatgttattggtgtatagaaatgctactgatttttgtacattgattttgtatcctgagactttgctcaagtcattagatctaggagtcttttcacggaatttttagggttttctaggtatataatcatatcatcaatgaagagagataacttgacttctcttttcctatttggattccttttatttctctcttgcttgattgccctggctaggacttccagtactttgttgaataagaatggtgagagttgacatctttgtcttgttctcattcttaggaagagcacttccaacttttgcctggtcagtacaatgttggctgtaagcttgccatagatggctcttattattttgaggtgtgttccttcaatgtctagtttgttgagggcttttatcatgaaaaaatgttggattttattgaatgctttttctgcgtctattgagatgatcatacggtttttgtttttatttctgtttatgtggtgaatcacatgtattgagttgcatatgttgaaatatccttgcatcccaggaataaagcccacttgattgtggtgaattaattgcttgatatgctgttggatttggtttgctaatattttgctgagaatttttgcatctatgttcatcaaggaaattagcctatagtttcctttttttgttgtgtctttgctagatcttggtgtcaggatgatactggtttcatagaataaattagggaagaatcctttctcctcaattttttggaataatttcagtaggattggtagcagctctttcttttatgtctggtagaaattggctgtgaattaatttggtccagggctgttctgggctggtaggctttttattactgattcaatttccttattcattattggtctgtttgaaatttctgttccttcctggttcagtcttgggaggttgtgtgtttccagaaatttatccattttcctctagattttctggtttgtatgcagagatagtagtctctgagggtcttttgtatttctgtgtgatcagttgtaatgttacctttgtcatttctgatcatggttatttagctcttctctttttcttttttaatctaggtagcagtttattaatcttgtttatcctttgaaaaaacaacttttgtttcattgaacctctgtatggttttttggggcctcaatttcatttcatctacactgattttagttatttctttgtttctgatagctttgggtttaatttgttcttatgttttagttcctctaggtgtatgcttaggttgttaatttaagatttatcttcttgatataggaattggcactataaacttttcttttaacactgcttttgttgtaacctagatgttgtagtagattgtttctctattttcatttgtttcaaagaattttttgatttcattcaggagcaagttgttgagtttccatgtatttgtctggttttaagagtgcctcttggtattcaacttattttttaaggctagtataccttgttactcatactcaacaaaaatgagacaaaaagaaaaatttacaagccaatctcagttataaatatagacatagaactttgaaacaaaacattaagaatacacaagcagcaatgtagaagaatgatcaaattagatttattactggagtgcaagattaagttagcattagaaaaatctaataatgtaattcactacattaacagatcaaagaagaaatactatataatcatcttaatagttgttgaaagagcattcaattatattcaatagcccttataattaaaaattcccagcaaactaggactaaaagagaatttgcttaaattgctaaagggcatctaaaataattataagaaatattatcaatgatgatacattgtaagtgttcttaaaatcaggagcaagcaagaatgcccactctcataatttctattcaacatggtactgaacgtccttgacattgcagtaagacaagtataagaaataaaaagtatgaagattggaaagtaagaaataaagttataattatttgcagtcaatatgcatatttgcatagaaagcccaaaagctataaaaattaaagttaataaaaaagtttaataaagtggcaaaaaataagattgatatttaaaggtcaattgtatttccatatactaccaacagacagaaaacatatttcctaaaagatgctattgacaatggcaacaaaaagcaaggcgcctaggaggaaatctaactaattattaatctaataatatataagatcataatggagaaaatttagaaaacttattgaaagatatcaaagaaaccaaagaactctacataaatagacagaaagggctgggtgcagtggctcatgcctgtaatctcagcactttgggaggccgaggcaggcagatcacaaggtcaggagattaagaccatcctggccaacatggtgaaaccccatctctaccaaaaaataccaaaaaaatgagctgggtgtggtggcacgtgcctgtagtcccagctacttgggaggcggaggcaggagaatcgtttgaactcgggaggcagaagttgcagttatgcagttagccaagatcactgcactccagcctggtgacagagcaagactctgtttcaaaacataaaaataaaaaaataaaaaatagataaataaatacataaataaataaaaagaaaggaagaaatgaatgataggagggattcagtttcatatctttcttctccaactgatttctagaatcaagtcaaaagtaccaccgggtacttcaccacttaacaagctgattttaaaatttattgaaatgagcgaaggattgctaagatacttctgaagaaaaataacaaggcgacgggactttttcctctcagatataagagcttgtatacaggaaaagtagtttgccagcatgatatctttgcaaagatggaaaaatggactaaaggaacaaaattgagaacccggaaacacgcttatatgtacctggaaactttatatgacagaggtgtcattacagataagaaaagatagactactcaataaatgctagtgtaattggttatacataaagaaaaaacaaatttagttccacacatcgtactgtatacaattccatgtttttgtttttttgtttgtttgtttgttttagacaggttcttgctctgtcacccagtctggactgcagtggtatgatcatggctcaccacggcctcaacctcctgggctcaagcaaccctcctacttcaccctctgtagtagctgggaccacagacacgcactaccacgcctggctaattattattatcattattattattattattttgtattttttgtagagatggggttttgccacgttggccaggctggtttcaagctcctggactcaagtgacccacccaccttggcctcccaaagggctgggattacaggcatgagccactgtgcccaggcagtccgtatattaagaaatgaaatgtgaaaggcgaaactttaaaaacaacttttagaagaaaatataggtaaagatctttttaaccttaaggaagaaggacttcagacacaaagctcaaattagaaagaaagtggttgataaattcactacattaagagctccctttaactgaaagatcaaaaaaaataaatagataaggtactgtgagaagatatcctgataaaaaatgtagagaattcattgaaattttaagcagaaaacgtaaataacttctaaacattaattaaataaaagacaacctaacaaaaaatcaaaacttagaaaaaatcgagaaaattaggaaaatatacattaaaaccatgatgagattctatttaacactcaccaaattggcaaaatctgaaaagcactggtcagaatgtgtgtcaaaaagaaagaactgccaggcagtggttcatgcctgtaatcccagcacttttggaggtcaaggtgggcagataacttggggtcaggagtttgagaccagcctggccaatattgtgaaacttcatctctattaaaaatacaaaaattagccaggcatggcggcagatgcctgtaatcccagctactcaggaggctgaggcaggagaatcgcttgaacccgggaggcggaggttgcagtgagccgagatcgtaccactgcactccagcctggcaacagagtgagagtctgactcaaaaaagaaaaagaatttttatacactgcgggtgggaatataaattgatacaaaccatttttgtataatgatatggcatttctagtaaaactgaagaaacactaaatacccagtaattaaacccttagtgtacactaaagacatgttcatcaattttcagagtagcattattttaacatcaacttcacagacatataatttacgtacagcaaaatgctcctactttaagtgtatagtttgatgagttttgacaaatgtacacaccagtgtacctaccaccacaattaggatataacactttctatcactcctaaaagtttcttcttgcttgtattagtctgttttcacactgctataaagatactatccgagactgggtaatttataaaggaaagaagtttaattgactcccagttctgcatggctggggaggcctcaggaaacttacagtcatggtggaaggtgaaggggaagaaggcagctcttcacaaggcagcaggagacagaagggagagcaaagagggaagaggctcttataaaaccatcagatcttgtgagaactcactcactatcccaagaatagcctgggggaaactaacccatgatccagtcatctcccaccaggtccctccctcaacatctggggattataattcaagatgagatttaggtagggacacaaagccgaatcgtacattacaaagctccattacagaagagcccttctcctactgccaatgcacttttccattttcttgaatgtcatatgagtggaatcatacaatatatagtcacttgattttgtcctctttataatgcttttgagattcatccacgctgttgcttgtagtttgttcctttttgtggctgagtggtatcccattacatgaatacagcaagagttgtttatatattcactagtttttagacatttgaattgtttccagttcttggctattataagtaagaaagctgctataaaaattcacgtacaggtcttcatgtggacatatgtttttatttctcttgtgtaaatttctaggagtggaatttttgggtcatatggtaagtatatgtttaactcataagaaaatctgttttccagaatgattatactattttacattcctaccagcaatgtatgagagtttcagttcacagcaacattattcataacagcaaaaaatggaacaacacaaatgttcactgtcagaagaatgaataaataaattatagtatattcattcataaaaataccatatataattaactacagctctatgtatcaacatgactaaaacatgttaagcaaagtaaaagcaaatcacagaatacatatggtatattccatatatatgtatatatttctaaactatgctatagtgtaggggtgagaagagataggggtgcttcaaatgcattggtaatattctgtttcttaatctgggtgataggtacatgggtcttagttattattatttaactggcacaatacattttatatatgtgtgtataatatatttttataataaaagtttaaaaagaaaggtagttgatgtttctttaatcttactgttgcttttctttaaaaagagaaaatatttgacttgagcatttgtcctatagtgccatgtattttcccaattctgttcagtattctatgtacttcctctgagaggttgcagtcttagtactggagtaattctggaatgcatttccatctctgagagtgaacatttagatgttgactctcagcagtattaatggcagcagttaaattcataaatccttgcttatggagatgagaatatagtccacctgatagcaaaaatgattgagtagaatttatttatttcttaaaattatactggggaaggatgtgtcttctatttatttcttttccaattcaattatttaaagctgaggtttaaaagtcatcacgaaattaccccatagccgaatataaaggatctgtcatcaattctagaaagctcagttggtcacttattgaataagaagactacactattgacagtaaacatttctctatctctcttttaggtcatatcatagcaatataaattgaagaagttgaaagtttcataaaatgaaaagtgccagtgaggaaaatggaaagatggcaagaaatcagtttttcatgtattttagtgatattaaaaaagatacagattatggagttccatcagatggtgcatctccatatccttcctggggcattattagtgaaggcaatttttttttattgtagttacaatctgattacaactttgattataaatatattaagatcccagcactttgggaggccgaggtgggcggatcacctgaggtcgggagttcaagaccagcctgacaaacatgaagaaaccccgtctccactaaaaatacaaaatcagccgggcgtggtggtgcatgcctgtaatcctagctattcaggagggtgaggcagaaaaatcacttgaacccaggaggaagaggttgcagtgagccgagatcatgccactgcactccagcctaggcaacaagagcaaaactccatcttaaaataaaataaaataaataaatatattaagacataatgaaattgtgtatttgagtaaattttgtatagctggaaattaaatgtgaattattacagaagaaatttcaaatatagaaggctagtaaattagctcttaatttattaaataaaaacaaaaatcaccagtgattcaacacttatggaattactatcaaaatacaaattatacacattttaaaaatgctttaatatcaatcatgagcttgatttttttcaagtttgaagcaaggtatatgagtaggggtaattattttatttcattttttaaatttttttattattatactttaagttttagggtacatgtgcacattgtgcaggttagttacatatgtatacatgtgccatgctggtgcgctgcacccactaactcgtcatctagcattaggtatatctcccaatgctatccctcccccgtccacccccccacaacaggccccagagtgtgatgttccccttcctgtgtccatgtgttctcattgttcaattcccacctatgagtgagaatatgcggtgtttggttttttgttcttgcaatagtttactgagaatgatgatttccaatttcatccatgtccctacaaaagacatgaactcatcattttttatggctgcatagtattccatggcgtatatgtgccacattttcttaatccagtctatcattgttgggcatttgggttggttccaagtctttgctattgtgaataatgcctcaataaacatacgtgtgcatgtgtctttatagcagcatgatttatagtcctttgggtatatacccagtaatgggatggctgggtcaaatggtatttctagttctagatccctgaggaatcgccgcactgacttccacaatggttgaactagtttacagtcccaccaacagtgtaaaagtgttcctatttctccacatcctctccagcacctgtcgtttcctgactttttaatgattgcctttctaactggtgtgagatggtatctcattgtggttttgatttgcatttctctgatggccattgatggtgaacattttttcgtgtgttttttggctgcataaatgtcttcttttgagaagtgtctgttcatgtccttcgcccactttttgatggggttgtttgtttttttcttgtaaatttgtttgagttcattgtagattctggatattagccctttgtcagatgagtaggttgcgaaaattttctcccattttgtaggttgccctgttcactctgatggtagtttcttttgctgtgcagaagctctttagtttaattagatcccatttgtcaattttgtcttttgttgccattgcttttggtgttttagacatgaagtccttgcccatgcctatttcctgaatggtaaagcctaggttttcttctagggtttttatggttttaggtctaacgtttaaatctttaatccatcttgaatagatttttgtataaggtgtaaggaagggatccagtttcagctttctacatatggttagccagttttcccagcaccatttattaaatagggaatcctttccccattgcttgtttttctcaggtttgtcaaagatcagatagttgtagatatgcggcgttatttctgagagctctgttctgttccattgatctatatctctgttttggtaccagtaccatgctgttttggttactgtagccttgtagtatagtttgaagtcaggtagtgtgatgcctccagctttgttcttttggcttaggattgacttgagagtaggggtaattattaaaaaaaaaaaagaagaagtaattctttcattgtgctccatattatttagaaatcttaaaaatatattttgccccaaatgattatatgagaaatggtgaagatgctacataaaggtggaattaaccatgtcagttgttttctttcttttttttttttcttttttttttagatggagtctcattctgtcacccaggctggagtgcagtggcacgatctcggttcactgcaagatctgcctcctgggttcacgccattctcctgcctcagcctcctgagtagctgggactacaggtgcccgccaccatgcccagctaattttttcttttttttttttttttgtatttttagtagagatggggtttcactgtgttagccaggatggtctccatctcctgacctcgtgatccacccgcctcagcctcccgaagtggtcggttgttttcttatgctaacaaaagactatcagactgggaatttctgaaagataggttgcctattccttagttgatcattactgctaaataggaattcccaatttttacacagtaagctttgattatttttatgaattaaatcatagataattctgtcctaaaggaaagatgaatttaaaatttttactttggaatataggtttgcatttaatttaattaaattaatttatttgagatggagtctcactctgttgcccagtctggagtgcagtggtgcgatcttggctcactgcaacctccacctcccaggttcaagcaattctcctgcctcggcctcctgagtagctgggactacaggtgcccaccaccatgcctggctaagttttgtatttttagtagagatgaggtttcactatgttggccaggctggtctcgaactcctgacctcaagtgatccaactgcctcagcctcccaaagtgctgggattacaggcatgagccactgcgcctggcctggatttgcattttaaatgacatatatttgtacaaatttcaaaagtgttttcatatgtactatacaatttgatgttactataaccccatgagattagcaggcttatctctattttgctagtaagaaaattagactcgtggagattaagtaaattgtctaagtatcttgactaatgactgacagatatagcactggaatcttttttctccttttgagacatggtctccctttgttgcccaagctgaagtgcagtggtgtgatcatggttcactgcagcttcaacctcccaggcttaagtgatccttctacctcagcatcctgagtagtaaggactacaggagtgcaccaccccgcctggctaatttttgtattttttgtagagatggggtggccatgttgtccaggctgatctcaaactcctgagctcaagcaatctgcccacctctgcctccaaaaggactgggattacaggtgtgagccaccacacccagcctagagtgtttgtcttttgtttctgaactcagtattatttctattataccataatttccatatcttatgtttgtcttcagacaaaagtaaaaattaggctgtcatcttgttaaatttcatctttagaagttgtggtaggctgaataatggccgtctaaagatatctggtgctaattctggaaacctgtcaatgtcaccttataaggaaaaagggtctttacagatgtgactaagttgaaggtcttgagatgtgaagattattctggattagcctttttggctagtagaaacagagacacagaggagaaagcaatatgactatggagacagagattagagtgatgtggccacaagccaaggaatgccagcagccaccagagggccaaggaacagattcttccctagaacctccagaggtagtacaatcatgtagacctctcaacttctgactactgaaacgatgttggacttctggcctccaaaactgtgagagaatgaatttttcttgttttaaattaccaaggttgtggaaatttgttacagcagccctaggaaactgatacagagatactgttcaaagttttcataccctgttcaactccatgcaattgacttgagtctttattttggaacagatggattcagaagaatctaaggtttgtccataaaaaattccccagaatagagaatggttaaaatgctgagattccaagcgcttctttataaagacacctcttctctgaaagttaatagggaatgttcacaggtttaaaagagaaatgttgctgggcaccatggctccctgtctctacaaataattttttaaaaattggctgggcatggtggcatgcccctgcagtcacagctactctggaggctgagttgggagaattgcctgagcctgggagccaaggctgcagtaagctatgattacaccactgcactctagcctgggcgacagagcaagatccagtctcaaaaaaaaaaaaaaaaaaataaataaataaataaaaataatgaaatagaaatatttaaatggaatagttattgttaattcaagtttaaaaaacagtcttgtctctgataagctgaaatgtactgaatccacctaagaaaaactgggagcatactgtgtatttatttgaatgccaaaaactcaaagctttacagtaaagaaagtgtttttcttttttctttacagaaagaacattggagctatcatgtctggaagtgtgtttgcaatctaattttacctattcactctcctccttaaatttttcttttgtgacttttctgcaaccagtaagggaaactcagattatcatgagaatctttctaaatccctccaattttcgtaacttcaccaggacttgccaagacatcacaggtgaatttaaaatgtgctcctcgtgtttggtttgtgagtctaaaggaaacatggattttatttctcaggaacaaacatcaaaaggtaaacacaaagtgaaggtgagaataaaatggtatcaggtataaattaatttattctgttaaaaacgtattaataatatattctttttttttttttgagatggagtctcgctctgttgcccaggctagagtgcagtggtgcaatctcagctcactgcaacctccacctcccaggttcaaggaattctcctgcctcagcctcccgagtagctgggaccacaggcgcctgccaccacacccggctaattttttgtttttagtagagacagggtttcaccatcttggccaagctggtctcgaactcctgaccttgtgatccactcacctcagcctcccaaagtgctgggattacaggtgtattagccacagcgcctggccaatatattccatttttagatccagtggcactggaacattcaatgatgtggctcttgatgagtgacttgctgggctttgggatgttactcggttttggtttactttgacttattgaaaacaaagaattcttaaaatacatcaaaatgccactgtaattcatatacacatgatgggtagaggattatttggcatatactctcttcaaaagtagtaaatctttaaaaaacaattttaagtgaatctgtagtttcttatagtaaaatcaaactttgattctctaaggaatcattgagcccttgcatttatacctactcctgcttaacatttagtcattgtatgtgaagtctttttacttctctgactctccagtaagcttcttgagggcagggcctttgtctttgcttactactaaatttcaagctttgtgcacaatgtctgacataatacctagtagacactcagtaaatttttgtggaatgaacaactgaataaataaagaataactgcttattatctgcagtgcctaactgaaccttgcagttatcatgagaccaatctatattatttaattaaatcaaataaaaatggatcattgagaaattaaataattcctttacaatcataaaatatgctgatggcctcaagcccaaacatcaaatttattacttgtatttattcagtgagagaggttgcctccttatcactagatactgaaatttatttttttggcattctttgagaatgggaacataatttcttggcatttaccttgtttttctgttgttttcatgtacttattgggcatttatgtatctcttcttttaaaaaatatatcattatagattcagggtgtacatgtgcaagtttgttacatgaatatattttgtataattgtgaggcttgggcttctagtgcgcccatcacccaaatagtgaacattgtacccagtaggtaatgttccaaccctcacccctctgccccttgtcattgactttggatgaagttcttactcaagtagtgccgtaactcctccaggttctgggctgaatgcaacagaaagcaaattgtgaaaatgcctctatgatgacagagaactaggaagtgttttaagggttggtagctcacagatcttctctgcctccttgaaaggtgaaaacagcacattgacacattgtcccagttgctgtggctctgtaataaagtacccccaaaactcaatggttttaaacagcaataattttattaaataaattttctttttttgtgtgggtcctagctatgtctattacattttctttatccactcatctatcaatggacattgatctatctgtctatctatctatccatctctccagatacctatctatctagtttactttttctttatctactcatttatcaatggacattgacgttgtttctattcttggctgttgtgaatgatgctgcaatgaacaagagaatgcagattgtgtcttcgggatgctgatttcagttcttttggctacataccaagaggtagaattgctggatcatatggtggttctgtttttaattttttgaggaaccgccagacagttttccatagtagccggaccattttacaatcccaccaacactgtgcaagagcttaaatttcttcacatttttgccaacgcttatgtttttttttcttttcttttctttttgagatggagtttcactctgctgtcaaagctgaaatgcagtggcacgatctcagctcactgcaacctctgcctcctagtttcaagcgattctcctgcctcagcctcctgagtagctgggattacagacgcctgctaccatgcccagctaattttttttttttttttgtatttttagtagagacggggtttcaccatgtgttggccaggctggtctcaaactcctgacctcatgtgatccacccgcctcggcctccggaagtattgggattacaggtgtgagccactgcacctgttcttttttttttttttcttagtaatggtcatcctgacaggtgcgaggtgtttctgattgtagttttgactttcattttcctaatgattagtaatattgagcaccttttcacatatatcaataggccatatatctttgttggagaaatgtctatgaaagtcctctgcccatttaaaaatatttgatatatatattttttgcaattgagttataggagttcctgatgtgttttggatattaaccttttatcagataaacagtttgaaaatattttctctcattctgtaggttgccttttcactctgctgattgtttcctttatgtggtctttctacctgggctagtctgggtgtcttcacatcatggtggccttaaggttttggacttttacgtagtggttcaaggctccagtatgagtgttctgaaaagcaagacaggaatttctttgccttttctgacttagtcatgcagtgtcacttcctctgcctttgattggttataagcaaatcacaaaccttcccagattcaagggaaaagaaattatttatttatgtatttatttttttgagatggagtctttctctctcaccaggctggagtgcagtggcgtgatcttggctcactacaacctctgcctcccagattcaagtgattttcctgcttcagcctccggagtagctgggattataggcgtgcgccaccacgcccagttaattttttgtattttagtagagacggggtttcatcatgttgctcaggatgatctcagtctcttgacctcgtgatccacccgccttggcctcccaaagtgctgggattacaggcgtgagccactgagcccagccaggaaaaggaattaaaagcaaatcacgaatgctaccagattcaaggggaaaggaattagattccttaatgagcaaatggtgaagtttttagggtaacatgtgtgttatggattgaattgggtcctctcaaattcacatgttgaagtcctaaccctcgatacctcagaatatgacattatttggaaatacggtcattgtagatgtagttaagatgaggtcattaggatgggccctaatccaatatgactgatattcttacaaaaaaggagaagtttggacacagagacatggacacagggagactgacatgtgaagatgaaggcagagagcaggatgatgcatctccaagtcaatgaatgccaaaggttatcagcaaaccaccattagctaggagaggggctcagccctcagaacaaatcaaccgtgccaacaccttgatctcacacttctagctttagaactgtgagacaaacttctgttcttttctttttttttttgagactgagtctccttctgttacccaggctggagtgcagtggtgcaatcttgacccactgcaacgtctgcctcccaggttcaaacgagtctcctgccaagtagctacacctgcaggcacacatcaccacgcctggctaatttttgtatttttagtagagataggattttgccatgttggccaggctggtctcgaacccctgacctcaggtgatctgcctgcctcggcctcctaaagggctaggattacaggcaggatcgccgtgcttggcccaaacttctgttctttaaaccccccagtttatggtactttgttacagcagccctaaaaaactagtacagtgtggaatgggaaatattgttgtgaccatattggtcacacaatacagtctgtcccacaagtcactggggaaatgtgtgtattttcttttagatgctccaatcctattccaacactaccacaacctggttttcatgatcttaaaaaatataaccaccttactgattatttttaggttggctgcagtggctcacgcctgtaatcccagcaattcaggagtctgaggagggaggatcccttgagtccaaaagttggagaccagcctggacaacatagcaagacccaatctctacaaaaaattaaaaaaattagctgagcatagtggcatacacctgtagtcccagctactcaggaggctaaggtgggaggattgcttgagcccgggagggtgaggctgcagtgagccatgattacgccactgcactccagcctgggagacggagtgagaccctgtctcaaaaatatgtatatatttttagtgtaggaaacttcttgtttctactttcttgtatagaaaggaagagatttagttttgaattgtatgtgttttcttgctatgtattaatattttgcaaataacattttcttaatcactttctagttcttatcaggagaggatcaatggaagtgaaagcaaatgattttcattcaccttgtcagcactttaacttcagtgtagctcctctggttgaccacttggaggaatataacactacctgtcatctaaaaaaccacactggaagatcaacaatcatggaggatgagccaagcaaggagaaatcgataaactacacttgtagaatcatggaatacccgaatgattgtatacacatttctttgcacctagagatggatataaaaagtaagtttttaaggaaactaaagggaaaaggagttatccgatatagatatgtaaaattaagtaagggctatcacattaactgaaagccaaatagctgaagaattttactgatgaaataatatagcctgaaagaatgttagtctatttatctgtttatttttctttcaaaatatgctttttatggggcctacctgtaacctgagaaagaggaggcatttatgggtcacgatttgaggagcactggaaagaccttctgcctcagaataatttttttttattgttgcagtggggtggtggtggttgtttgagacagggtctcactctgttgcccaggctggagtgcagtgacacgatcactgctcactgcagccttgacttccccgggctcaggtgatcctcccacctcagcctcctgagtagctgggactacaggtgtgcaccaccacacctggttaattttttgtatttttagtagagacggggtcttgtcatgttgcccaggctggtcttgaactcctaggcttaagcaatccacctgccttggcctcccaaagtgctggtattacaggtatgagccaccacagaataactttgaaacatgcctattttctgtgagtgaaataataccaccatatttgtgtactaaagggaggcatttcttttaaaatatgaatattggctgggtgcggtggctcacacctgtaatcccagcactttgggaggctgaggtgggaggatcatgaggtcaggagttcgagaccatcctggctaacacagtgaaaccccgtctctactaaaaatataaaaaattagctgggtgtggtggcatttgcctgtagtcccaggtacttgtgaggctgaggcaggagaatcgcttgaatccgggaggcggaggttacagtgagccgagatcgcgctgctgcactccagcctgggcaacagagtgagactctgtcttgaaaagacaaaaaaaaatatatatatatataatatattatatattatatatatattatatatatataatatatatatattatataatatattatataatatattatatatatatgtagcacattgtgatatgctattaaatttttgttttgagttgatttaacatgttctctcttggagctgagaaccaggcctggatgaaatgggagtttgctgtaatgctgtgaagatagggtgaggtacagattaggcacctagaggaaaaaataggagattaaaagacaaatcttacatacttgcataacttaattctgtttaaggttggttaacttcctagttaccctattctgaaataccacaattattcctttctactaagcagtatgccctacttcacccaaaaaatctattcctggagagcatcttttgatacatgcatttaatgagtgcctgctgtatgctaggcagtgtgtcaggtgttggggtcatgaagttagatgatatgaaacaatctgaaagagggcgacccctcacctacaccagcaagtgccttccagtgccacaggtgctatgggagagtaatttgctgtcctttttgatattccagacatacggaagcctttcagattgcttttctaaagctttaattattgtaaaggtaatgattttcaaaatattacattcactttaaagcaaacagaaatatataatgtgcacgcatttttaagataaaatgtgagacttcaaagaaatttctcctgtgactaagttttcccacggccctataacctctgcaattaggggtcatttcaaggtgtgtgcatgagtgggggctatggaagaggatctgagtagatctgaacagaaggatcagttccctctgattgaggagtgaatgaattggaagatggactctggaaagattgcctagagaaggtgactgtagtgaaatctgaagggtaaagaagtttagattatagacatcaaaaacatatttttttcaatgtacatttgtatatccacctaactgtattttatattttttctaaaataaagaaaaaataagcacttccataataataattttaagatttttgtgtgtgtgttcatggaaaaaaatccataaattctagaatcaaagtgaaataatagttaacagcttttgggtgtccacaaagatagcagtggtgcacaaatatgtactcttgtattctgcgaaaagtatattcattttgccatgggtagaaagttaaaggtggctgggcacggtggaggctcatgcctgtaatcctagcactttgggaggctgaggtgggtgtattgcttgagcacaggagttcgagactagcttggacaacatggtgaaaccctgactctacaaaaaggatgaaaataagctaggtgtggtgcacacctttagtcccagctacttcagagactgaggcaggaggactgcttgagatagggaagacaaggctgcagtgagctgtgattaggccactgcactccagcctgggtaacagagtgaaacactgtctcaaaaaaaaaaaaaagaaaagaaaagaaaaaaaaaagacagttaaaactttattcatagtttactctgctgtgcaaaaactaatttgatcttgcttaaaagccttcttaactgggcgaggtgggtcatgcctgtaatcctagcactttgggaggccaaggtgggtggatcacttggggtcaagagttcgagaccagcctgactaacatggtgaaaccctgtctctactaaaaatacaaaaaattagccgggcatggtgtcatgcgcctgtaaacccagctacttgggaggctgaggcaggagaatcgcttgaacctgggaggtggaggttgcagtgagccaagatcgcaccactgcactccagcctgggtgacagtgagactccctctcaaaaaaaaaaaaaaaaaaaaaagaccagaaaacaaaccaaaaaaacaaagcaacagcaacaaccaactttgtactttggtgggagtaaaagccttctccatcagcgggtgaaactaaatgtgatccagtctggcaaatttactctgagataataatttaaactgttccttgatgttccccccagatttctgtctgtttccccttgctcctctctaagaaggctgcagggatgggtgggcagcacaggaccctaggagatacactcttctgagatcatgctggtggctgcactggctggtctggtccccatcatgtgtcttgtgttattgcaatatgaagttggttctgtttccatagctttatcagtgcccaatgacaccttggtctttggacccatcctgatcgttgctggcactgccagtgttctctgctatttaacttcatgcttttattttgctgcgtgaggaatgcaagcctggcagctgaagagcgtggaatagtcttggggaggctgagcgccgccatcctaatccacctctgccctttttctacttagccacctctctaaatgaatgcttaatgcctatttagtgtacatctgggttcctgtaaaggggacacccaggttatgaaccccacaaaggcagttcataccaagagtataaacatggtatacattctgctaaggtgcataagtactagctgtcttttgtatgcaaagaagagtgtacacagggtgggcttagaaagtcagtagacaggccaggtgcagtggctcacgcctgtaatcccagcactttgggaggccgaggcgggtggattgcccgaggccaggagttcaagactagcctggccaacatggtgaaaccccatctctactaaaaatacaaaaaattagccgggcgtggtggtgagcacctgtaatcccctcggaggctgaggcaggagaatcgcttgaacccggggagtggaggttgtggtgagctgagatcgcgccattgcactccagcctgggcaacaagagtgaaactctgtctcaaataaaataaaataaaataaaataagataaaataaaataaaataaaaaatgagtcagtagacagttgtgtgttagctatgatgatgccacccttgtgtgagtcactgattcctggttctgctggccagtgtgtctttatgagaccatgggagaccgtgctaagctactgctgcatggtgaacatccttcccatgttgcctcattgtcatctgaatgaatgagtttatacctgtatccttattaaatttaggccagggcaactacgtttaattagtgcatgcacttgatctgatcattggcgtgcaaagcactgtacttaccgcctattaccctgtggaaagagggtctgattattcattgtcctggccacttatatgcctcagaccagtcctttgactgcctgcctttctctttcttccccatcttccttgtactcactgcatctttgctgatttgaggacatatttttgggctgcctggcccagggtcaaaattatgaattgtaagtggttctgattctgggattgctatgttgtggtcttaccttagttacagcgaggatagtgaaactaatatcagcataacctgtaagtgaaaggaatcctagaattttggaactacatggatagctggaagctacctactcaagtttacccgtataataccttcatttcatatatcaagaaagaattcaggagagctagtgaccctgtaacagtgatggtcataatttcagcttttcaattcagggcagaatatgttgtagaactcagctacactgccacattgccttttatctgttgaataattttactgggtttttacagtatttgttttctttacagatatcacttgttccatgaagatcacttggtatattttagttctattagtttttatatttttgatcatcctcactatccgcaaaatacttgaaggccagagaagagtgcaaaagtggcagagtaagtataatccctgtagtgccgaggaactcctgatctcttctatggatttcatttcctttttagtacaatttagcatttcttgtgcacctactgtgaataagtggtgattcttggtaactcaaggaataaaaacgtagataaaacacagttccagcatgcaaggagcttcattcatctttcttctactcgggcaagtaagagaagaagaaagactgggtgaataggaagaagctgatgagctggacattgagcagggcttagcggaagtgagggcagagagagagagaagaacaggaagtggggataaagaatttcaggccgagcgcggtgactcatgcctgtaatcccagcaccttgggaggctgaggcaggcggatcacctgaggtcaggagattgagaccagcagaccagcctggccaacatggtgaaagcccgtctctactaaaaatacaaaaattagccaggcatggtggcgcaagcctataatctcagctacttgggaggctgaggcacaagaatcacttgagcccaggatgtggaggttgcagtgagctgagatcgcgccactgcactccagcctgggcaatggagcaagactcagtcacaaaaacaagaatttcagagttggagatcttgagcagagtggctgtaggtgacgggtgtgaggcagagtcgatctttaataagcatgggggtatcagatttttggcagggctgagctaaaggaaattagaaattaggaatcaggacagtaggagcaacgttaaaaatatttaataactcgtatgacctaggcacccacctatcaggatggacattgattgtaaattactggtatgatgctaccggtgtgtacccatgcaaatactggctctactggcatgtccccagtgcataaaatggatgactatcaggcccaatggacaattcataatatgagtagctagtctcttaaagacagtgcaagatgtattactataagaataggcactaaaaataaatagatttatgttagagtcctagtactaccacttactagctatgtgacattaagcaagttatttaaattatgtgagcatcccttacatcctctgtaaaacaagcataatcaccactaccacacagggttgaggtaaggaaatacagagattacttacaaagtttaccacagtgtctagtgcataattagttttcattaaaggacagtagtattgtggtggttgtatgatttcccaagactctttccttctttaccaggcaaggctgtgttagccatttcagtaggcagaacaagtggttgcctccaggtttcagtaaagttgcaattcattcttttgactaggtatttgttgcagatatttttgagagcagtttcatatcaagtgttatcattgataccttagtaataaagccctttgtgcagtggttaataacataatcaatactgtttatttgtagaataaccattttcagagcattttcactagattcttaaactgtgtaaacaggatatatgctatttttattttgtagataaaaatcccctgagacttagagaggttaagtgtttatccaaagctgcacagctagtaaaatgtcagaactaagatgtagggtatttagttttgaaaattctattatttaaagtaaatgtgtgttatttataaatagtgtatagttctgagtttcttgacccattttcccatatgaaaagctataagcaaagagagatagaagtgagctagaaaaaatgtctagaaggagaccagtagtggggagtcaaattaaattcttacaaatatctgcccaaatgacagacttagtgattttcaaaggcttgcaaatccaagcatacaaagtaataaaaaatgtcacactacttagcacattaaatgttattgaatattaaacatacattgaatattcttcacatcatatctatgtatataataagataaaaatatacttttctgtgtataagagctgtcgctttccttttttttttttttttttttttttttttttttttttttttgagatggagtctcactctttcgtccaggctggagtgcagtggcatgatctcggctcactgcaacctccacctcctgggttcaagcgattcttttgcctcagcctcctgagtagctgggactacaggcatgcaccaccacgcccagctaatttttgtattttttagtagagatggggtttcaccatattggccaggctgggttcgaactcctgacttcgtgatctccctgcctcagcctcccaaagtgctgggattacaggcgtgaaccaccgtgcctggccatgaatggctccattctttttggtaatcctttgaaccaacatggggaatatatgttaacaatgcgcttgtttatcatctaaatacttcatttcttttctgggaataggtcatagagacaaacctacatctgttctcttaagaggaagtgattcggagaaactgagagcattgaatgtgcaggttctttcaggtaagttctgtggcatgtaaacaaaacagcactcaggaaattccaaagctgcatggtttcactacacagtaaactcaagatctgagatctgagcttatgtaaattagccttgtatctggaataacagagctgtgggcaaatgaaatccagtttaatatgtcttattatcaggggacagtagcaatctaaactatctccttaaataatggaaagtttgcttaattggcaagaagaaattcatgtgagtaggcagaggagagaaagcaatagggataagacttagatttatttttaaatgagacaagataccattattccccagaattgcaagaagtaattgcagagtgggcatggctttcgctggagccttcccttagcagagggtgtcattgtgtaaagagaacttctaatagccccaattaaaaagccccctgtcctctcctgagaaacagaaatggaataagggaattctaattagagcagtgatgggggctgttagcacagatgttgtggttcaatccctttcttctaattgtgaagcctccttttggattcaagctgtcaaatcacgttaaaaagagaaagagagagaatgtgacatggacgaagccctcttctttagcagagagaaataatatccttgaccgtgaaaaccacagaattatgagtgctgttaccaaagctccttgtacacagccagcgagtaggtgccttcgtactttgtgagaagttagaaaaaaaaggaagcttcaagtctggcatgtaaacagttttcaaaaatgggaggatgccgagcaaacctccagtcccccaccctacagctgcatcagtagcgacatagagatttgcaccgcatttcactggggactttgttcactgggggcttttgttagccatttaaattagcagatacacggaaccctagcttgagtgcacctaaggagctcaaatattttaaaaatttaggctttctacccagcattagcagtgaaagtattaagctatgactgataataagcattagctaaataatcatttgacaccagttaaatgtggggtaagttggtggaaattttgtccagtcaatgaaaatcttatttgattaataaattaaaagctataacgttgttttcaatggcaaaattaatttttaaaaggcaaaaatggcatttttccctgggctcccctcttactcagtacatgtgtccaaatatgaggacagttttaacacagttctgtggggctttttggtcaccttaggaattctggtcgtttctgttttcaagtcgtaattttgagcactgctgtcttgtctgagaaaaagtctatagttcccccgtcaacccatatagtcgagggaatcacaaattttaagtactagctaaccacaagactaacctcgcaaagttgtatttatgagcctgtgactttcatccaccaaagaaacctgtcttagccatcctttccctttcatagctctcactaaaaatcctctggctttattaccaggtatataatattaatgtttagtgtaggtcaaggggtgatggcctttttaaaaccaagaacccttttgaggcttagcgtcttaaagagagaaagaggcagactctttcttatttatattcctttaacctaaatgcaatcttttccttccctattatgagttgcttttctgacagagaaagggaaaggaaatcatgtctcccttgagtgcagtttttaaggcctctctttgtagtgatggattataggcagcagtgagaatgtacgggaaaaatgtgtcagcatggttctctggagatgcagtaacacgggtagaaaaaaaaaatgtagttcaaagcggtggtgactgtgtcacattcagcagaagcagcttgttgtcaacactagccacacattccaggatgtctctccatttgttcatgcatttaaaagtgagtattgttcaacacacacacacacacacacacacacacacacacagagagagagagagagacagagagaaagagagagagagagagataaatgggctcgtacctccaaaagaagcttattcatcctacaagagagaaataaggagagattaccaggacgcaggcaccacattgtgcctggcagattctaggggcacggtggacactgatggaataaatgcatcctgctgctgtagaaagagatgtcaaactgaatcaaatccccatcttttatgtgtctctaatattttcctccttgctttgagaagcgtgacagcttatgtgtcctggctgggcattaatctactttccatcttattcatttaactatcgtcttcacacacgtgatctctgtcttatttatctgtggagtgttgttgctagcataatatctggcactataaaagcttattaaatctcgcaaaccctcaagggaaataagtatagagtaaaaagagcggatgagcaagaaatgagtctgagggattgggaaatatgacagcaaataaagagacagagtaattacagggcatagaattccactttattaaagaaggcatagcacgctttgtagaagggctatggatatcaaagaatcataaaaaacattgactgtcttgaagaagggattttgaaaaacatgcaaaagtaactctaggccgagtgtggtggcccacgcctgtaatcccagcactttaggaggccgaggtgggaggatcacttgagtccaggagttcaagaccagcctgggcaatatagtgaaaccccatctctataaaaaataaacaaaattagtcagatgtggtggcacatgcttatagtccctgctactcaggaggatgaggtgggaggattgcttaagcctggaaagtcgaggctgcagtgagccgaggtcacaccactgtactctagactggataacagagcaagactgtgtctcaaaaaaaagtaactttaaaacgtacccctagaaacagtgagtgcttaatgagttgaccatgttgggaaaccaaagccaggggcaggaggagtggattagaatctgaatcgttggatgcaaatgatagaagcccacttgactgactgcagagaggacatttgttggaaaaccagtaggtagcccatagaaacaacaggaggctagggaaactaagcgtggaaaataaacaggtattaaggtgagggagggcaggaaaccaaaaatacagtccaagttgcatgtcaggaatggtctggtgagaatgctcccgctggtgtcacccccctctgaactgctggggccactcctatgactaccctgcagctttgcatctctcctcaggattgcaagctccaagggaggagtatgaggggaggccatacagtggtactccaggtgccaggaagcagggagaggggataatatctgctcttctggctttctgcatacttgtcatcacccctgacatgtccacatgctggactgccaaataaatatcgacatcaggtttccgggatcagagtttccatccactcctgctgtgtgggtcagtgaaaagttcatttcatatctcccctatatgtccatcaaaaagagtgaaatccttaaaacttgaaattcttcacattggattagtcagggttctctagagggacagaactaataggatagttaaatgatagttattcatttaactatcatcttcacacaggtgatctctgtcttttttatctgtggattgttgttgctagcataatatctggcactataacagcttattaaatctcgcaaaccctcaagggaaatgagtatagagtaaaaagagcggatgagcaagaaatgagtctgagagattgggaaatatgacaacagataaagagacagagtaattacagggcatagaattccactttattaaagaaggcatagtacgctttgtagaagggctatggatatcaaagaatcataaataacattgactgtcttgaagaagggattttgaaaactatgcaaaagtaactctaggctgagtctttataaagggaagtttattaaggagtattgactcacgtaatcacaaggtggggtcctacaataggccatctgcaagctgaggagtaaggaagccagtccgagtcccaaagctgaagaacactggaatccgatgttccaaggcaggaagcatccagcatggagaaagatggagtccagaagactcagtcagtctaatctttccaggttcttctgcctgcttttattctggcctccatcgctgctgattagatggtgcccactcagattgagggcaggtctgcctttcccaactcactgactcaaatgttaatctcctttggctacaccctcacagacacatccaggaacaatacttcgcatccttcaatgcagtcaagttgacactcaatattaaccattacgaccattaagtatttaaccaatatttactgaatactgactacgggtcagccattatactaagcattggtgatataatgggcacataccataggcacagtccttgcctttatagagcttccaacatagttaaggagattctacctgtggttgacataggagaagggaaactaatatctcattaagcaccttccgtatgttctgtactttcatgcacatcatttcatttgatttcaaaactccgttttttttcctgatgagaaaactgaagataagggagtttaagtaactggttcatagctggtttctaacagagccagggttcaaactcagttctgtccaactgatgcactttctagcacgccatgtaatgtcaatagtgaactgggggactgggggtttaagccacagatcaaaagccttcctgctcttttgcattttcagtttctcattggaaactgagacaaaacattttgtctatataaggtcctaagagcttgtgtataacaatgtgagtcatcctcattgtggcactggctgaaattttcttgcaattaatgtgagtgggttctgagggaacacgaagcaaaagaaaatggagttttattgtgaaagagaattactaaatgtcaaaaggaagtggatgacccaataatttatattacaccaaaataaaactaatggcaatgtaaaattataatttggaacatgtttatggccgctataataaatactaagcaggtttcaacttcctgcagatgagaagataaattactggtgccagatgtcctgcaaccaagaaagataacgtgaaaatttaatttttacttgcttaactatcttatttatgactcttaaaatacagatttgggttcataaaacaggaaaggttacagccatctgcttggttacagaatggatcaaagtgaagaggatgattctttttgcaggaagaaattcacaaatgtgaagaatctataggcggaataggacgatttattccagtcattcattgaatgcctttacgtgacaggcatatatgtcaggcctggaagaattgatggtaaaacatgtgcacataaacatctccttcatcttaatatagattgtccctgcctgaaccatcccgcctctcctgccaccctctacaaacctgctcccctcccaccctgatgttgtctcgttagctcccatctttcctttcccatctgatcttggcttaactaacgaagttgtttcagacctcctggactaggtcgattctccttattacacaccctcataacaccgtacatctttctttgcagcaacaatcactgttgctattttacatttttgtgttattgtgctttgtgttattatttgattagtgtttctcccatgagccagttggctctttgaggtcaaggacactatctgatgatactcatcactgcatccccagctcatagcataatgcatatatatgggcatgtcataggtacccaataaatatttgccaaataaatacaactctacattgactgcgttgaaagaatggctgctgctgtcttacaaaagcctttcaaatactttcacctctaacttataacttttgattatgcctatccaaaataataaaaagaaaatggttaaacacttcatcagttttatcctttggagtattaaagatacctgcagtgtgaattaaccagaaactgaatcagtgtctcagaatattggcagctgtcagttcaagattttttttttttttttttttagttaatctggaaaattttgcagtcatttattttccatcctcattttattttcacattgactagatttggagcagatgactagttttaggatcattgttaataacagatggagctttgaacatgggaagaagttggcaccttgaataacagaaatctattttaagcggccataattggttctgttagccctaaaaggctactcgctatcttgggcttacagaaaactgccaacgtttttatgtgatgaaaaggtcagaatgatgtatagcaatattgaagttctgcatttctctggtaataaggagacataattaagactggaaggttttttgaagccagatcactgaactgaataagaatcactaaaccatcagaaaattttcacagctgtcttgacctgagtaatctatgaagactaacttgaattccttcatttttggagaagctcttgtgaggaaacccaaatacttcatggataactgtttagacatttattgccatagtttccatgaagagtcatgatggctgcatctcccaaagtgtgatggagaaaagaaggagctagggacatcatttccaaggtcagctacccataggcctcccctgctgaatatatatggctcctactaaattctgtgcatgccccctgggagggcttaaaaagatgctggtgaaaatattttttgtgcttcatagtgctttctattttcccaagtataatatatcaaaattcacagttctcatctcattttatccttacctttattttcctccttttagcctcaaggcagccacactagctttgcgaaagccacagggaagtgatcttggttgtgcaggtgtcggtccccactgccaaaactttgaatggaacgtgtggggcaaggccaggaccctgccaggactggctgcttggctgctgctgcccacaaggctgcacaggtgcctcatgtcggtgaatctatctggtccagtgcttccctttatgcctggggacttagcctcctgcaatggcagcacatcaagaaggatccattgtataatgcagttcacaccaacaggtttataaaacctcaaggccagtgcattaatccataaagaatgatacaattgagagaaatacagatcaaacacttctgacagcaaatgtgcattttctctcccaagacagatccgtgtgggaagtcaaatcacaggaaacagatgttggttaggtcttaaaatgcattcccttgccagtccaggtgtggtggctcacacctgtaatccaacatttcgggagcctcaggtgggaggatcccttgagcctgggaggtgaaggctgcaatgagatgtgattgtgcctctgcactccggcctaggtgacagagcgagaccctgtctcaaaagaaaaaaaaaatgcattccttggcagatagcttgagactttctccccattttaggggtagcctgacaagctcatttaacagagaggttttaacatttaacaagctttggattgggaataattttttgaagatgaatttgtgtgtctgtgtgctgatcgtgtgctgattttatagattaaaatcagaggaccattttatttttgttacccccaaatcatgggtggccctctggaattgctccttgaactgcctgaacccataccctgttgctgagcgaaatgaggcacagaggcgttaaatgatattcttttgatcattcagcccatatttgttgagtacctattatgtgtctaaggtaggttctggggaataaaacagtgcccagaataccagctttgtgctcaaggaggcagacaaatgagtaattacaacaaagttgggtaagttctctatttgggacgtggagggcacagagggacagatactgtgtgatctcctaaccctatttactccttcttggtatttttttaaaagttacttttggctttccaatttaataaccatataaaatgtagctgaacaagtagttttggagataagagaataaaaaaaaatggctggggcaaattcccttagcagtcaagagaggctggctaggatgaagaagttttagatgagctttcatggtgggagatggaccttgtctttgacatgaaaatcatcaggaccaaagtaacgaaaacaccttgcaagtttccagtactcagtgggaatcaaaagttacttgggaaagatgagttgaggttagataccagatgtcatggatataaagcacctttgaaaagcgatagaaatctttatctaaaagaagaaaaagaagaagcatccgagggctgcctgggcatggtcagggatagtgtgataggggctttatttgagagcataaggcatggaattttatttttaatcagtttctactcctgaaaatccattttgttcactagattcagccaggtcaaaattcagactgggatttaaaaaaatttttttaaggctgtttgaagtttctgaaaagaagtcatagaaatgtttgtttcagagatttgataaattcatgaaaagactgctgtgaagctttaaaatatttctgactgtttctactgccttaactagtgttggtgaattaatattatttgaaagaaattgtatttcttatgtagaaccagaaaaaatttccacccgttttagctattctgaagaaggcattaaaatgacatatatcctacctttttgccttttaatcaatttttagaagatttgctattaccatataagttacatgactttggatactgaaagaaactgaagataatgccccactagagaattactttagactagccatcattttgacaggcaatcgctttctgttgtaaattacagttatattttatgctataaacaccagcaaacaccagccaaaccagcggtttggcttttcaacgaaaagaactctgttaatttccttggataattatttagtttcatgaataggctcttttgatatcttaacctttataaagaatgatctcagctgggcccagtggctcaagcctgtaatcctagcattttggaaggccgaggtgggcggatcacttgaggccaggagtttgagaccagcctggccaacatggtgaaaccccatctctactaaaaatacaaaaattagccggtgtggtggtgcacgcttgcagtcccggcttctcaggaggctgaagcaggagaattgcttgaacttgggaggtggaggctgtagtgagccaagattgtgccactgcactccagcctgggcaacagagccagactctgtctcaaacaagaacaacaacaacaacaacaacaacaaaagaacaatgtcaaatgttaaattgtgggttataagatgctttgttatttgcatggtaaattcattctgaagctttaatgtgcgtcagaatcaacttggatgtctataaaaatccaggctcctaggcttctatgaagatagattcttaattcaatagatctgcaacatgcattttaaataactacctctgttgattttcaggccaagggtctgtcagtcactgtacttattagctttctgttgttgtgtaaccaattaccacacacttagtggcttaaaacagcacacacttattatctcacagtttctgttggtcagatatctgtgcgtggcttaaccggatcttctgcttagggtctcacaggctgaaatcaagatgtcagctggactgcattcccatctggatgctatgcatctacgctcactcgggttatgggaagaattcacttacggctgtgtacggagggccttggcatcttcccggctgtccactggaggctgtcctcaggacccagaggccacttggcagtcaccaccaggagtccctgtccataggcatttcacagcatggcagtttgctttttttttttttttttttttgagacggagtctagctctgtcaccaggctggagaacagtggcatgatcttggctcactgcaacttccgcctcccgagtgagttgaagggattctcctgcctcagcctcccaaataactgagattacaggcacgcaccaccatgcccagctaatttttgtgtttttagtagagatgggtttcaccatgttggccaggatggtctcgatctcctgacctcgggtgatcctcccgccttggcctcccgaagtgctgggattacagtcgtgagccactgcgcccagcctgcagtttgcttctttaaggctagtgagagtctttctgacctcaggaagggccgtttctcttttaagggattttacctctttaattcaggcccatccaagatggcctccccttttattgatttgggatattagtcatacctgtaaaatcccttcatctatgccttataatatgacctaatcacaggagtgaaatcccatctggttcatggtcttgcccacgctcaaggagaggagattataatgagtattgcacatcaggggggtgggactcctggggactatcttagaatgatccacagccattcttttagaaagacaaaaatcacaggccaggcgcagtggctcatgcctgtaatcccagcactttgggaggccaaggtaggcctcgagatcagaagttcgaggccagcctagccaacatgatgaaaccccatctctactaaaaatataaaaattagctgggcatggtggcacatgcctgtgattccagctactcgggagtctgaggtatgagaatcacttgaactctggaggtggaggttgcggtgagccgagattgcaccactgcactccagcttgggtgaaaaagcgagactctgtctcaaaaaaaaaaaaaaaagaaaagaaaaaagaaaagaaaaaaaatcacagactgctaggaacttctagtgtgagactgggctgacagacatagccccatagatgtggttggtacttaatgacaataaaataaaagttaaggatgccaaggggctcaaatgcaatggatgtgtgtggaggagagcaggagatgagtgctgtgggccaggtaaagatggcctcgggtctcattttcccctctttgtcctaataagtcaaaggaagttttgtcatttaccctttagaagtctaaagggtaagaagaaattctaactttagtggtgattttagtttttccgtagacatctaagggccctcaatatctgctggaaatggcctatttattcctgccccttaaacagtagttactatcttaattttaaaaatcttcagatcaggcgcggtggctcatgcctgcaatcccaggactttgggaggccgaggtgggcggttcacctgaggtcaggagtttgagactagcctggccaacatggtgaaaccctgtctttactaaaaatacaaaaaaatttgctgggtgtggtggtgtgtgcctgtaatcccagctacttgggaggctgagacaggaagtctcttgaacccgggaggcagaggttgcagtgagccaagatcatgccattgcactctagcctgggcgacaagaatgaaactccatctcaaaaaaaaaaaaaattacttttaattaaaaaaaatcttcagttaaaatatataattttctgggaaaaatgtataaaacccaacaccagaagaattagaaaatctaaattgtcatggaagaaatagaaaatgtgttaattgtccttcaaaaagtaacaggaagagcagttcgcaggagaatgctaccaatctctaagacataggtatttccaatgtatttaaactgttgcaagaccaaagatatttcctaattctatttttgaaataaacattattaataatattcaaatccaagaaagattgagtctaaaatgaaatcagcctggatgcagtggctcatgcctgtaatctcagggctttgcaaggctgaggcaggaggactgcttgagcccaggagtttgaggctgcagtgagccatgatggcaccactatactccaacctgggtgacagtgcaagagcttgtctaaaaaaaaaaaaaaaagagagaaagaaagaaaaaataaataaatcattgagaaatcttacttgtgtatatccatgcaaaaatcctaaataaaacattagcaatccagtagcacagtttaaaaataacacacacacacatacacacacacacacacacacgcactccttcctgatcaagggggcctattccaggaattataggacagtttagcattagaaaacctgttactcatcatcatatttatagatgtaaagagataaatggttggttatactaaaaatgcatttgacaaaatacaatgcatttttcattaaaacttctaataaaaataagacaaatacatacttccttaatgtgataaaatgataaaatatatttctctcaaacaaacaaaaaaccccagaaatatgttttatagggaaacactaaaagcgtgccctgccgagccagaaattttccagggtgtccactactgccattttatctaccattgtattggaagtactagtcaacacagttagttaagtgatcagaaatacgaagtttcaaaactggaaagaataggtaaaatgatcacgtattctgcagatgatacaattgtgtacctggaaaacctaagacaattcccttaaagaaatcatgaaaaaagaaaaatttagtaagggacagggtacaaaaatatttaaaaaattaatgggatccacctacttaaacaataaccagttagaggatacactgtatttaaaacaattataaataaagtaactaggaataaacttagtaagaaatttgcaagatctttctgaagaaaacttcagtaaaatgctactgagtgacataaaaatgacttgaataaaggaaaaatgtatcatgttcttgaagaggaagacgaatatataaagatgctaattcttcctaaataaataaaaataatatcttttgaaataaacaagttcatttcaatatccctatgaaaagtaaactgtgagtaatagccaggaaaaaattgaaatagaagaatagaggagaggtattcattccatcaaggtactggattacaaactgactggtattgggatgactgaataatcgtttaggacaacaagttaacttaatcaagatctcacactcacattagggtgacttttaaatggatcaatgattttaatttaaacattaaactataaaagtaatagaagaatcaatgctacgactcatttataactgcaaaattggtctttctaatcatgacacaaaactcagagaagagactcatcaaattgactatgtggaaaaaaatgtacacagcaaaaaaactatcacaagctaagaaaaaagaccaacaattaatgggcaaaattatttgcagtttatcgagtaagcaactaaatctctagtaaataaggagcttctaataattgaagaaaagaccacaatgcaggaggcaaatggtgaaggataagactggactgcctacagaaaaggaaatacaaacggctggcgcttacacacgtgaaaggttgctcaggctcattcagaataaattcttccaaaaacagttttttggtgtgagcctactatgtgccaagaatattgaccttctgggtatagaaggcagtgaatccctccccactactccccagaaaaaaaaaaaaagaaagaaagaggcagggaatggtggctcatgcctgtaatcccagcactttgggaggccgaggcaggtggatcacttgaggtcaggagtttaagaccagcctggccaacatggtgaaaccccgtctctactaaaaatacagaacttagccaggtgtggtggcacacatctgtgatcccagctactcaggaggctgagacagaattgcttgaacccaggaggcggaggttgcagtgagctgagatcgcaccattgcactctagcctgggcgacagagtgagactctgtctcaaaaaaaaaaaaaaaaaaaaaaaaaaattcccagagaaggttctacagtatttctgtaccagtgtttgatcatcttcatggacaagaagcataattttcttgaatacactaaatctccctttctgatttctcttcttaagtagcaaccacccaaacttctctttaaattgtaggtcacctcggctgggcgcggtcactcacacctgtaatcccagcactttgggaggctgaggtgggtggatcacctgaggttgggagttccagaccagcctgatcaacatggagaaaccccgtctctagtaaaaatacaaaattagccgggcatggtggtgcatgcctgtaatcccagctactcgggaggctgaggcaggagaatcacttgaacccgggaggcagaggttgtggtgagccaagatggcaccattgcactctaggctgggcaacaagagcgaaactctgtcttaaaaaaaaaaattataggtcacctcaatttcacctgtgttcagggctttgtatcaaaagtagagatgtctatgaaacaaaaactcaattctcaatataaaagctagaaaaacaagaccgtggatcttaggagaatgaacgagatgtcatgatgtaggaaataaagtttcatcttccacctcgaagtcagctgaggataatattagaagaattttaaaaagtcatacagtcatgagcaggaagacagattagaattcatctaatttgtgactttgcttcttggtaaaattgtccctgagatcaaagacatcattaatattctccttagggacatatttcaacaaaatgtgatagaataaaatgtttgcagtcagtttccaaactaagattctttgcttgctacttgacactggactttaaatttgttctctacgttgtcttccttaactatgcttcaggtatttgtgcccaggacgtggggtgaggagttgagagaaatgggtgaaaggtgttagagaggtaggcaggaaaattagtgagggtagaaagtcccaaaatcctttctagaggtagagcatgcttctcttgctactcttactacattagaataagcctgtctctttttgctatttactacatatagactaaaacagttctccttcttaaatagcagagaccacgcagaggctgcctttggatcaagtccaggaagtgcttcccccaattccagaactataagttacttccacagtgcatcagtgagatcaatatacacggtgagtgatgattcggctttatcgacttcttcattataaacacagataaattcaaggatgcacagttgatcccaaactccatttctatctggtaggaggtagaaaatgatgaatttgcaaagtcagttcatatgaattagatgacatgaaataaaatgactattttctctaagatctaggaaggatcagtagatggatctcttagtctgttaaactaatctgttagtcttttaaactgctcctgagatgatagcttatcccttggccctgtttttccggagttgagccataacttagttagactatgagaaaatagagaatgagatgtgtaaagcaaactgcctcctccacaattattgaaataaaaacttctctaaatgtaacatctgataatctaaattaatgcatattgatttccatgaatttaagtctaaaagtatggtcaaaagtgttgaaatttttttttattcattcatcaaatctttcttaagtagcaattatgttaaaggcactaggaatagccattgtagggggtataaaaattataacagggaaggggagggaaactagcatttataagcatcccacttattgtgctttgtggtaattggttatatcatttactcttcagaatacgtgggtggtttttcagtcaaggtcctatcaggaaattgatattgcactcaaattgaataatttgagattagtttaatgaagggcatattaaactagggtgtgggaaaactaaaagggagaatgcagcaccctgagactaggaagagtggggccctgctactgtctttaagactaaaggggaaagaaacccagagagacagagacagagacagacatgcatgcatgtatacacacacacacacacacacaaacacacacacacagtgtgtgaggagggctgtcctacaggagctgtgacatttggtcaagggacactatagcctggggtcaccctgaaaagagagaataactatcctaactttgggaactcttttacactgttggtaggaagagtatagccactacagaaaacagtaggatatttctcaaaaaacttaaaatagaactactcttccattcagcaatcccgctactgggtatctacccaaaggaaaataaatcacctcagggtgtggtggctcacatctgtaatcccagcactttgggaggctgaggtgggcaggttgctggagctcaggggttcgagaccagcctgagcaacatggtgaaaccctgtctctacaaaaaatacaaaaattagccaggcgtggtgacacgtgtctgaaatcccagctactggggaggctgaggcaggaagatcacttgagcctgggaagttgaggctgcagtgagctgtgttcatgccatgccactgcgctctagcttgggagacaaaatgagaccatgtcttaaaaaacaaaaaaagaaagaaacggaaaaagaaaataaatcactatagcaaagggatacctatactcacatgtttattgtagcactattcacaatagcaaagatatggaatggacctaagtgcccatcaacaggtgaatggataaacaaatgtggtgcatatatacaatgaaatatttgccataaaaaatgaaatcgtgccatatgcagcaacttggatgggactggaggtcattatctcaagtgaagtaagccacggacaaaaaggcaaatatcacatgttctccacttgtaggtgagagctaaaaaagttgatcacatggaagtagagtggaaagatagagaacagagactgggaaaggtaagttgtggggagaggatgaagggaaatggattaaagtgaagggaaatgggttaaagggtacaaatgtacagtcagatagaaggaatacattgaatgtgtgaaagcacagtagcgtgactataattacacaaaaatgtattgtacttgggcgacagatatcctaagtattctgacttgatcactaatcactatgcattatatacatagaacaaaagttaacaggtaccccataaatttgtacaaacaaaccccaactttgccatcatctcttcctctaatgtgctagtactcccccattgaccaaacccagccagagccagagggcactggagcccagcggaggcagttatgtaagttggcctcccagggcaccaagtagggtggaaacgagtggagggcagattgggagaggcagccaaagggatccagcgtcgatggctcaatacgccaaattgaaacttagtgccaagaatctgtctgtgttcaaggttaaagagaggcaggtcttagtactttgggtctcagtgcaaccagggtctgctgttggctcagaaattcctaagtagcatatagtgtagtcatatgattgtgtcaatgaaatattactggatattattatgctcgagacctctcattctggttgttcattctgggatgcttatctttgcatctgaagagttcctctttctttgttcattcaccaaatgatttttgaccacctactgtatgttgagaatcctactcattggcaaaaacaacaatgtagtcaatggaggagtcagattagagaagccctaattccaataaagactcaagtaacatgataaaggtgttcacatgtgaagagagggacttggggagcacgatagagagactcctccttcagaggacatgatgcctagcgtttagatgttcaataaggatttgttgagtaaatgaataaatcccaatttctatgtctctgtgttagaatcatggaatgttataattgaaagaaactggcatgaacacttacactttcatttgatagatatagaaaataaaccaaacatgctgtagcagcagaggttagtggagactctaggtttccttggtcctaggctgagaagtttgttatcactgagcacaatgtcttcttagggatataatggggggtgtcatggcgtaacacagaatcagtcctggggtcaccctgaaaagggagaataactgtcccaactttgggaactcttatacactgctggtaggaatgtaaactagtatagccactacagaaaacagtatggagatttctcaaaaaactaaaaatagaactactgttccatttagcaatcccactactgggtatctacccaaaggaaaagaagtcatggaagggtgtggtggctcacgcctgtaatcccagtactttgggaggctgaggcggtcaggttgccctgaaagagccctgaatcagagacttgagaacattttttggtggtcttataagccatagttttaacaaacggttttaaaattgttttctgcccattctaattcaagtaacacttaacaaaatttttgtgtgaataatattttcttgcttttatttaaatcttcagaatatccccgggcaagttggaccgagccctttgaagaatactcagaagtttattttgtgaatgagtagactggaaaatgtttgtgtccagctgaggatgcacagttggaaagcaggaggaatgctgactggttgatgaaaactagcttaagagcattcattcgctccatgagatcaagggaacaagagtgtttgcaagaagccattatgagtcatggaaaaaaagatgatgaaacccatggaaacagcaagagaattcccactctctctcttcttaaaaaaaatctatcattatacagcacagagtggagccaagtttttaattttgaggaaccaaaaacaggatcaaatatgaaaaccctttcttttattgggccacattgtagatgctgatttgataattgtttcctatgcagatagattatttttatttcacagattatttaaaagggaagagggcctggttgtttatttatatgtttgtttgcatttatgaatcttgctgccttttagcaccaggatgtttttaaaaaaattcaaagaggccaggcgcagtggctcatgcctgtaatcccagcactttgggattctgaggtgggaggatcatgaggtcaagggatcgagaccatcctggccaacatggtgaaaccctgtctctactaaaaacacaaaaattagctgggtgtggtggtgcgcgcctgtagtcccagctcctcaggaggctgaggcaggagaatcacttgaacctggcaggcagagtttgcagtgaaccaagatcacgccactgcattacagcctggtgcagagcaagactctgtctcaaaaaaaaaaaaaaaaaaaaatcaaagataccaataaaacgaatttaaataaaatacttaagtactttaatagcaaaacgtttcctttgattcttttggctttcatatttgttatagccattgttaatgtcaagcataattatagttactaataacaataaaaaagcacatatagacaagagggcagctcttgacattaaaatataaacatgcttttccagagttaaggtggaacttaatctcctggccatcattatatggctacagttgcttatctgagttgatttacaggattaactgcagggtcagatttaataatcagtgatggggttgaggacacgctgccccaaaatatggcaccttggcaaactgaattttttaagctgaaggatttgagaaaatggcaaattttaagtggaaatattactctgaccttcctttgccacctttctccccggaagcaggtaataaaacctttgctgaccttcctctaaaacacatcataggaccctcatgtgagaggtgctcttcctgtatccacagaggaaaggcagttccctatctcccaagacacagggacccagaggagaatctgaacaaacgggctctgctaagtttccctccatttattcctattagatctagtactctttttgcctgatcatatttctgcaagtgtctctccattcttcatcaaacctactactaaaaacactcaagtgtaactgtttcctctgatcttcacttcctgaggatggcccttgtgttacgtagaacttgtttaaataaaccactatgtttttctctggttaatcttttattataaaggattcagctctgaatttaaaagggtaggaggaaaagatatttttcccttcctacataagcaatctaacaggcatgaatattccagcacacagaggtttttttttctggtattcgattattttttctctagatcacaaattgagattctaattgtaaaatttagagattgaagatttcgcaaacggaattacagtagtctcactttttctggtctgtgtatccctaaataataggtgagtcaaactcaggtctgggatttttcagcggtagtgaaggggcattacaccctgtgaggtatggatattatgcaatttctcagaagccaaattattgtttccctacacaccacctcttatgttctgaccaatgacttagaaatcaatgagaacttggcttgcaaaaagcaaacataaagcttcgagtccagttaaattgtggcagctttcaggaagctaatttcgccgattcattaaaataatcgacttttaacagatactgtgacgcacgcaaagatgtagatggcctactctgcctacagagaatttacactctggcagaggagacaggatgtgtacaccactggtgaaaatactggacacaatacggtaagctaagtgtcaattgcaggatgcatgcttcctgctgagaatttacaagccaataggatcacttccagttgggaggaattagggcaggcttttgagcagggttttgaagatggcttttcctgattctcagaatcaccaaacctctcaaataaacacgttctcagcccccatagcccttttcatacctgttactttgtcattatttttgtggttacgaattaatgtctgtcttcccctctagactggaagctgcatgaggacagggaacatgtctggttctgctcaccataaaatccccagcagctggtaaggtgtttggctcacagtaggttctttgtaaatatttgttgggtaaagcactaggccgggtgcagtggctcacacctgtaatcccagcactgtgagaggcaaaggcaggaggattgcttgaggccaggagtgtgaggctgcagtgagctatggttgtaccaccgcactccaacctaggcaacagagtgagaccctgtctctgaaaaattaagaagacctatttatcgagccttcactctacacctggcatgggccccgtgtactctcatttattcctcacaatgatgccttgaaacaggtgtcattctctctgaggaagctgaggccaagtgaagctcaccaatcctattgattgatattcttcagtcttaggttggtcaggctgcaaaacctgtgcagcttctacaatctgccttgtggggtagagacagggcaaagggagcaaaatggatggagggcgtgcctgagagaagtggctgcggctgagagcactgtcaaagatgtcttcaaggagcgcaaggaggctgggtgaactgggccctggaagaagacatctcactggagttgttatgtggtcactggttctgtgtgcctcccctagcctggtagttctgtccccctctccatacaactggccccagtaaaaaccaaccagtggtccttggtgcctggtatgattgaaggcttcccattgacaccactagcttttcgtgtaccctgctttccagttggttccaaacttgaccttgacccacccataccccctccctatgacctgtggcttagtcctgtgttcgtggctctcactgcaggctttcctccccagctgtaagccacactcacctccttgacctctgtgtcctgctaagcagccaggtccctagcctgcctttcaaaggattcaggtgtagattgaagagggagagaggaaacatggcaccatgcaggagtctttcagtcattaagcacacagtggaattagagtgacaaaaagaagagatagaagagaggatatggatggagaattggtggtgcttggtaagtgatttgatgcaggggtgatagggtaggcagagaaaggaggagagatgagacacacatgacaaccttccagactcccgtgtgcagaaaataaatattgcccaaacttatagctagtttttagtttctagaagaatttttattttccaggggatttctaccaaactctgtactttcatcctagcctgaagttggactcttccctctcctatacttagtcatccctggatgaaatagtcattcagaccaccttcttttccctgcctttttaatgattgttacatttgccctttcctttcatctttataaatcctttacacgaaaggcagataggccaccttgtccatgaagtttcccctgctcaccccagatggaacaatgtctgttgtttctgtgtttttctaggatttagtcctcttatcatggtacttctcacatcttgccttgtaccacagctagttgtattcatttctctttccctaccagactgtgagtgagagagggaaccatatcatctccagcttctgagtctctgatgataggtactcacttctctccaacctgcttctcccaagcaatagtcatctgggttaatggagttagccagatgttggctgtagattcaggttatctgtaaggggatggaattggaggcccacacatcagggccttctagcccaaggataatgttcttttataaacttgggggcaggtgtatgagagttcattgggtcacaattctatatagcttatatatattgtaaaatgaactttagtacctacttaatatttagtaaaataaaattcaaaaatagacaaatattgtactgaattgcatccatccttaccttctccttctgtcagtagagaactcctgtctgtttctctctctctgaactatcttcctttccctttctgtcaaacattgtggaataaagacttggactcaattttctgacacagtttattctcataatttgactccatttacttccttctctgtctccttgtctattttacttctttttctgtctacatgtttcttcaccatctccaactatttgtactattatgatggatggcaatcttaggataatgagtggaaaggagttcttaagttttgaaaatttaagtaaggtgtattaccagattaacctagagccatgaaaactaaaatatacatttaaaaaatcttctgtgaactgggaattatgtactttggtaaaggttctgaatagacttcttttttttaaaagaagacataagtatatgaaaaaatgttcaacatcactaatcatcagggaaatataaatcaaaaccatgctggggtatcatctcactccaagtcaaatggccatcctcaaaaagacaaaaaataacataaatgctggagaggatgcagagaagaggaaactcctgtgcactgttggtgagaatgtaaattagtacagccattatgaaaaatagtacgaaagtttcttaaaaaactaaaaatagaactaccacacgatccagcagtgctattactgggtatttatccaaaggaaaggaaatcaatatatccaagaactacctgcacctcagtgtttattacagccctattcaaagtagcccaaatatgaaaccaacctacagatccatcaatggatgaatgaataaagagaatgtggtacatatatgtattagtctgttttcacactgctaataaagacatacccaagactgggtagtttataaagaaaaagaggtttaatggactcatagttccacatggctggggaggcctcacaatcatggcagaaggtgaaagccatgtcttacatggcggcaggcaagagagaataagagccaagcaaaatgagtttccccttataaaaccatcagatctcatgagactgacttactaccatgacaatagtatgggggaaatcgccctcctgattcaatgatcttccactgggtccctccccaccatgggagctacaattcaagatgagatttgggtggggacacagccaaaccatatcagtataaacaatggaataccattcagccacacacacacacacaaataaaattctgtcattcacagcaacatggatgagcctggaggacatcatgttaagggaaacaagccagatgtagaaagataaataccaaatgttctcactcatgcaaaagctaaaaaaaaactagcttgtagaagtagagagtagaattgtagttattagaggttgggaagggtagagagagggaaggatagggagagattggttaatggttaaaaaattacagagaggaagtcactgtatagtcactacaggatggctatagttaacaaaacagtattgcatatttcaaaataggtagaaaagaggattgtgagggttcccaacacaaataaatgataaatgtttgaggtgatggacatgctaattactctgatttaatcattacacatgtatcaaaatattactctatatcccacaaatatgtgcaattattacatgtcaactaaaaaaagataattcttctgcaaatagtagaaggtccaagtgaaagtgatttaaatgatgaggagatttattatgttatctaatgggaaattctaaatagggtgcttccagagttgcttaattcaagactcatcatcaagcactcaagttctttcttctctttcctctttgccatcttcagattgttggtgtttgtgttcatgcttcccttctcatggtttcaaggaaagattatattaaatggtggggccatagcagcaacaatcatcacatctttttttttttttttgagatggagtcttgctctgtcgcccaggctggagtacagtggcgcgacctcagctcactgtcacctccgcctctggggttcaagcaattctcctgcctcagcctctcaagtagttgggattacaggcacccaccaccactcctggctaatttttgtatttttagtagagacggggtttcgccatgttggccaggctggtcttgaactcctgacctcgtgatccacccgccttggcctcccaaagtgctgggattataggcatgagccaccgcacccagcccaatcatcgtatctttacaccttgatttttcttttttagttacctaggctggtctcggactcgtgggctcaaactatactcctgcctcagcctcttgagtagcttggattacaggcatgagccaccacacctatagccacaatgtcctctatccaagtgaagaaacctttacaaggagtctcctccatccccagcagatttattctcatgtcagagcatctagagcaaggtcacagagctacccttaaaccacccaatggcagggggtatgggaccatcatgactaattacaaccaatcaggattaacctgattctcaagttggggaggagaattgaccatcagaataaaaacagggctctgtaaacacggaagaagaggaaaatgactcttgggtgcctctgtgaatgttccttctcacatccaaggagatgtgcaaagacagaaacaattttttttttttttgaaatggagtcatgctccgtcgcccagagctggagtgcagtggcatggtcttggctcactgcaacctccccgtcctgggttcaagctattctcctgcctcagcctcccaagtagctgggattacaggtgagcgccaccatgcccagctagtttttgtatttttagtagagacggggtttcaccatgttggccaggctggtctcaaactcctgcccttgtgatctgcccggcttggcctcccaaagtgctgggattacaggtgtgagccactgtgcccagccgagagaaacatttagaacaaaacacagacttgtgttttttccccccagaacaatctcttgaggcatgcgaaggctgttctgcaagcatgtgtcattgtctaacattttgtgatgggtggtcacatctgtgtatggatacagtgttgtcatggggccaatatctctatccaaagttacatctgttttcagatgggctgtgaaaatagtccatcgattttgacttagaaagttctattaatgtgtggtatcacaaagacagacacaacatttgtagtgaagagctgcccagtagtcagtgcacttctcataatcataccccaatgtcctcttagggaatcacctctcacaggttgaacaatgtcttggtgggactattcatcaagggttcttgcccaccagccaatgagtggcatgtgacttgagctagactaatttgaccctctatcttaggactttgagttttggattcagtgaggtaagggtggaaaaaatgaagctcattcacttcagtaacatagttcagttattcctgcctctaaaccccaaacacatcccctatcctcaccaaactgccttggttctagtactagtctgttctcatgctgctaatgaagacatacccgagactgggcaatttataaaggaaagaggtttaatggactcacagttttccgtggctggggggggcctaacaatcatggcagaaagtgaaggaggagcaaagtcacgtcttacatggcggcaggcaagaaagtgtgtgcaggggaaatccccttactaaaactatcagattcgtgagacttattcactatcacaagaacagcatggaaaagacctgctcccatgattcaattatctcccactgggtccctcccatgacatgtaggaattatgggagctacaattcaagatgagagttgagtgggtacacagccaaaccacatcagttctgaacctggttctccaggcttccctttgattctgtgggctaccagtgatattcttgcaaaaatatccttttcccgcgtacgtttccagagttagtttctgttgcctgctggatacatttaacatctattttattttataaagtcataggatgtcagagctgtaagaaatcttatagatctagttcatctccctcattttacagctgaggaagctgatgcccccagcggttgagggtttcacccaagatcacatcacagaggttgtcaatgatggaacttggaaagaagacaaggtctcctttccctagggtagtgcaggctgcttttttcccctaagtctctttttagtgtaaagcacaacttctcttctttttctctctgtgtgtgtttatctgcaatatttaataggagatagtgactttaaaatcctcatttcccccccagactgacagtttgctttgtatagtttaaaggcttgtttcagagatagacctctcagggacttggtatctggcaaagacaggcattagtttatgtccctatatggagccttgcttctttccagctatctgtaaatgtttattctcttacatgaaattcatgtttggaaagaaagtggtttgctctagggaaacatatgggctagagttctgaaagtgattatctaccatttctaagtctgccccttgtaagctgtgtatattgggaaaggatctcccttcactcacactaaaggatatatagctgctctacattttcagctgctttagggtagccatagctcatgcaaccactgtaaaaaatagcccaaggttgggataggagtttggaagggaatttagaacagtattgactatgtgccaggtaccatatgaagcacctagcatgtattaattaatgaattaatattctcctcacaaggttaggaggtaagtaccattattattacccctttttataagtgaagaattaagtcaaagagaggttaagaaacttgttcaaggtcacacagcttttaagtggcaggattgaaattcaaacccaggcagtctagttttaaagtctgtgctcttaacccactgctctgttgcatcttaatcgctgaatcatggaggtaaaagtgaatcatttctgttgaactcccaacctcaagtgattctcctgcctcagcctcccaaagtgctgagataataagtgtgagctaccttgcttggctatgatctttttcttaggaaaaaaagattgttcaatacagacaaataccttttcataaacacttctagtagagagttctgtattgcgaatctcttgatctcaacaatgcttggaaggtctacttataaaccgtactctaccacaagttcgctacacaacaaacatgctctcatctgtacccatgtaacaaagtacctcaaagaactcaattatttggtagttgtgagaagaattgcacagaattaagctttttgctttggatgctcataaaataggatcaataagcaatgtgttaattgattttttaagagaaattcttttaagccatgtcgagatcctctgtggttaaaaaaaaaaaaaaaattagttacaatacaaaaacacccaagcaatgataagaaaaagtcatggactgagtctctggaaagtcccctttccccttgctgggttcaaaacacgtttttctacttgaaatttcttgtctacagagagaaaggaaatcatctctgttccatttttattttggcaaacaatgtagggcttctttttaagcaatttagcattacaaagttccagtatgtcaaacaaaacaacagtgcttaacgattacatcacagtgagatatttttcttgtgttagtctttattcagtgtagacaattcagtaggaaaaaaaggatacttaaaaaattgtcagccgggcacagtggctcatgcctgtaatcccagcactttgagaggctgaggcgggtgatcacctgaggtcaggagtttgagaccagcctggccgacatggcgaaaccccatctctattaaaaatacaaaaatcagccaagcgtggtagcaggcgcctgtaatcctagctactcaggagtctgaggcaggaggatcatttgaacccaggaagcggaggttgcagtgagccgagattgtgccactgtactccagcctgggtgacagagcaagactccatctcaaaacaaaacaaagcaaaacaaaacaaaaattgtctactttatttctactaactttattctgaca

SEQ ID NO: 964 - DNA, 1561 bp, Homo sapiens
catgaatgtactgcaagggaacacatttgtgtcatgtgaagagacatgacaaaaacagccctccttaaattatttgtggcaatagtgatcacattcattttaattttgccggaatatttcaagacaccgaaagaaagaacattggagctatcatgtctggaagtgtgtttgcaatctaattttacctattcactctcctccttaaatttttcttttgtgacttttctgcaaccagtaagggaaactcagattatcatgagaatctttctaaatccctccaattttcgtaacttcaccaggacttgccaagacatcacaggtgaatttaaaatgtgctcctcgtgtttggtttgtgagtctaaaggaaacatggattttatttctcaggaacaaacatcaaaagttcttatcaggagaggatcaatggaagtgaaagcaaatgattttcattcaccttgtcagcactttaacttcagtgtagctcctctggttgaccacttggaggaatataacactacctgtcatctaaaaaaccacactggaagatcaacaatcatggaggatgagccaagcaaggagaaatcgataaactacacttgtagaatcatggaatacccgaatgattgtatacacatttctttgcacctagagatggatataaaaaatatcacttgttccatgaagatcacttggtatattttagttctattagtttttatatttttgatcatcctcactatccgcaaaatacttgaaggccagagaagagtgcaaaagtggcagagtcatagagacaaacctacatctgttctcttaagaggaagtgattcggagaaactgagagcattgaatgtgcaggttctttcagcagagaccacgcagaggctgcctttggatcaagtccaggaagtgcttcccccaattccagaactataagttacttccacagtgcatcagtgagatcaatatacacgaatatccccgggcaagttggaccgagccctttgaagaatactcagaagtttattttgtgaatgagtagactggaaaatgtttgtgtccagctgaggatgcacagttggaaagcaggaggaatgctgactggttgatgaaaactagcttaagagcattcattcgctccatgagatcaagggaacaagagtgtttgcaagaagccattatgagtcatggaaaaaaagatgatgaaacccatggaaacagcaagagaattcccactctctctcttcttaaaaaaaatctatcattatacagcacagagtggagccaagtttttaattttgaggaaccaaaaacaggatcaaatatgaaaaccctttcttttattgggccacattgtagatgctgatttgataattgtttcctatgcagatagattatttttatttcacagattatttaaaagggaagagggcctggttgtttatttatatgtttgtttgcatttatgaatcttgctgccttttagcaccaggatgtttttaaagattctgaggtgggaggatcatgaggtcaagggatcgagaccatcctggccaacatg

SEQ ID NO: 965 - protein, 292 aa, Homo sapiens
MTKTALLKLFVAIVITFILILPEYFKTPKERTLELSCLEVCLQSNFTYSLSSLNFSFVTFLQPVRETQIIMRIFLNPSNFRNFTRTCQDITGEFKMCSSCLVCESKGNMDFISQEQTSKVLIRRGSMEVKANDFHSPCQHFNFSVAPLVDHLEEYNTTCHLKNHTGRSTIMEDEPSKEKSINYTCRIMEYPNDCIHLHLEMDIKNITCSMKITWYILVLLVFIFLIILTIRKIGQRRVQKWQSHRDKPTSVLLRGSDSEKLRALNVQVLSAETTQRLPLDQVQEVLPPIPEL

SEQ ID NO: 966 - DNA, 59002 bp, Mus musculus
  misc_feature (1)...(59002): n = A,T,C or G
gggagtccaaacatgctgaaggatatagaccatacatgctaaagggaatcagatgcagcctctgtaaagaggcagacaccccaatctacttagctggaggaaatatggttgaaatatatgggcatatttggctcaaagaataaagatttgtggtggggatatcttttcaatgttgggctcatacagaaatacaatagttttgtatctcagagattataatgagaagtgacagatgaacaagtattgagtgaccctagatccagggagtattcaaaagctaataataataataataataataataataataataatagacattcttcatcatcaaggatctagcttttcctgtgacagaacagacactacttttgtatatactcaactagacatgatgtttaatatcagaattaaagtgtttagtttcagaagaatcatagagactaatacatttatgcttagttttcttcttttcctcattctgtttcttaaagtttcttgtagctcaggctggccttgaacatgctgtgggctaccttgaattgagccccctgcctccacctctggagtgctgggactacctgctgtatttaggtaatgctggaggtcagacccatagcttcatgcatgctaggccacagtttgagctacaaacccaggcccctcttttgttttctcacttgaaatggggagtctccctctgtagttcaacctagcctcaaaggagggatccttctgcctccacctctggtgtagccacatctcgctctgatacatggtttggaaggacagtgtggaccaaatggcttctggctccattctgctttatgagaaattattctgtgaacttaaaagactgcagagaagcaaactgaatacagcttgcattttatgtttcagtgttgaatttaaatcagataatatttaatcagacagtattgaagggctgtaagagaaccctttgggttttattggatttatgatgaaaatatcttggagacaggatctgaattaaatatgttttcatagtgtgagatgacctagaaaaaaaagggaagcaaatggcttcatatacatagccaccttctattttattaattgagttaattatcctgctggtgttgggaagatagaggtgtcagtaacccacatatttgtctggtgtttcacttgtttgttattttgagagagtcttgctgtgcattcctggctggcctggaacttgctatccctcccaggctggcctggaacttgctgcagtcctctggcccctatcttccaagcactggaattatacatgtgtacccccacacctggattctactggtatctagaacatatggtgaggaaacatactacttagatccaagtcctgattctaatcataactccaccacaatcaccaccgccgttaccactactcccatcaccaccaccaccaccaccaccacctctatcacctccttttctttaggcagtcttttgtggcctaggttagccttgaagatactatgtagctaaggatgaccatgaattccagagcaactttcccctacatcttgaaacactgagaccatcctgttggggtttattctgtacttcaaaaacagacccaccaacttcgtgcatgctatgaaccaccagttttggtaatatccaacgggcaaagtgcataaaacagtgccttcctggtatggttttagtggttcataactataattctgtatttgggaagctaaggccgagggatcaaggttatcactaactacacagaaagttcaaaaccagtcccagctatctgagttcttaccttaaaatcataaaaacagaaggacgagagagctgcctcgggtaaaatggtttgtggccttccggaggaccagagttcggataggcagcacccgtgtggggtggctcacgactgcgtgaattccagctccaggggatcatatgccttactctggcctctgtggcacctgtagacatgttgcatacatccacacagacacaggcacataagtaaattaaaaacataaataaggcttgaacaaatcaataaaaaaaatgagaaaaacaaattgtattttaaaaggtcaaaatgaaacctaacactttgctcatttaaaaattaagacgtttttaaaaggagagaaaaaagcaatgcctagaatattttatagaagcatttacttttgcccacctaagtaagttctgcggctgttgagatggttcatcgggtaaaggcacgtgtgaagccgggtgacctgatttccatccttggagtccctgtggtagaaaaagaactccaggaagtttccctagccccccccctcccccccccgtgggctcacacgcatgtgcatgagaatatttgtacttgcacaaatatataagtaaatgtaataaaatgcttattaaatgttctgcctttatgaagctccaactctggtttagttttaaaatgtagcacatgtaaacacctatatagcaagtatatatgatatcttcctgtgtagctcaggctggtttcaaattcttgatccttcaaatccttttttcttttcttttttttctgagacagggtttctctgtatagctctggctggcctggaactcactctgcctctgcctcccaagtgctgggattaaaggctaagattacagataggtgccaccgtactgggctcctgatgtacttcagcttaatattttttcccctctaccttagtcaccatagttgcggacaatgaggaagacttctgttccaatccagagggttttcccaaacctgtgtgatttacctttcacagtcaccaaaggacctgtgttacctgccacaatttatagaatgggtgccaaaactctgggcttgaggctcatactacaaattttaggccatgtgtatgttagtggaattagggatacaatcagtttgatccaacggaaaagctgcacttgaaaatggagatatatgaattaccaaaagtcatagtgtcctggtggtggtaggtgagggtgatgcttgcaggttaggtggggcccctgggcttctcctctgggggactcacaagtgcacacctgaccgtgtcactgcctggatccacaccctcttcatccttatttttaggatgaccttcagacctgtttcaaaggccaaatttccaccaactttgctggcttgatctcagatttggctcttctcgttatggcctactccctggccttggctagcttctttccgacctcaggggctttaattgtgattttctcactgactggaactacttcctctttttttttttaaataaagctatccttccccacagcatactttactttagcatgtcgtcagcttaaatgcctttttcccagagaattctcagtatttcagagtgagctaggtctctgggccatgctcatggacctctgtatttaaccacaggactgaccatggttctaacaattataatgtaattgtgtcagctgtctccagtagaatgccatgctctgtgaagacaggggctgatggtgagacaagtcaaccaacatggagatggtatcaagctacaatggtcaaagactcctccagccaagaaaagtaaactcttatcaaggatcaatataatttaaaacatacagctactagttcacgtttcttaatgacagtttacctgtggtacaactgctaggtaaaaccatgcatctttaaaacttgttagtcccaaattttttttaaaaaaggaaaaaaatcacaacagcaacagcagcaacatttcacagaaaggaaaagaacaatatgaaaacagctcaaggaatacatgaaggggtaaaatatccctggggagggaaaaacacggagttttattgaagaaaccaagcagagactggtctgcacaggaaagtgtgtctgggagtcaactgaaggaccttaaagtagggatctatataactcaagaagcccctagttcatgaataaaaatgacaacttgcaagcctaccttacttggctccatttctcattcattctagcctttgcttaaaggcttgaaacacttgaacatttagcttaaggagaaaaataatcccatcatatgtcccatttctgaagccactttagacctggctttgctactagaaaacttaaatataagtctgtggccttgtttaataaagtacccccagtaagagctagaaaacaggggctgaagagatggctcagtcccgacagagttcccagcacccacatggtgctccataacagtctaactctggacttccaggatctgatgccttctttggtctctgagatcactgtatacacgtgatgcacagatacacatgcaggaaaacattcacgaacgtaaaacaaataaaatctaaaagtaatttgagaaatatcagaggacacccagattgggttaatagtttttggtggcactaatattaaagggagaactgaacaaagtctgagtctcaaaaccagtgataattgatctcatggttcaaaggaaaagggggggagaatctaaaaatcataaattcagacatgtctcagatccttgtcctctggatccatgccgccttcagggatccatcactataaatgttcttggtcatctgtctcacttgcatgatattatttctcaatacagaacaaaccaacctaggttcactgggattccaggagaattcagtgattgtggctgtgtgtcctccatggtgggctctcctccacttcttgtggcctgttcctatctagttttatttaaaccccagccatcccatctacgatcagtaccaccagaagccaaagtagtctcattgtgaggtggtgactgaactcggactatttcatctttatatgatgtactggctggttttatgtgtcaacttgacacaggctggcgttatcactgagaaagtagctttagctggggaagtgcctccatgagatccagctgtaaggcattttctcaattagtgatcaagggggaaaagccccttgtgggtggaaccatttctgggctggtagtcttgggttctataagagagcaggctgagcaagccaggggaagcaagccagtaaagaacattcctccatagcctctgcaccagttacaaccctgacttctttggtgatgaacaacagtatggaagtgtaagctgaataaaccctttcttccccaatttgcttcttggtcatgatgtttgtgcaggaatagaaaccctgactaagacatatgattacagcttgagtttcagatttctcagatcccacaaggctgcagtcttgccagcagatcccatggcaagagtaacctcactataaggactgaaaagcaagcagtctacctcagcagcatgggcatcttctcagtggcttggaagtattctttgagtggctatcacgagtcttgtgtttatgatcatccacaactgaccaggacagatgccaggaaatgtggattacagctgtgtgtcctgtcaagatgggctcagcatccatcgctgttccttcctttgaagctgaactgctgtcccataggcagatgctactgtcatctggagagctaagaacccaccaagatttgcctcctttcagatgctccactcgccaagggtgtctggcttagaaggatgcttgtccaggcaaaatccagattgtcactggatggagtctttcttgcaacgattcaagcaagggttctgagggaatgtaacaagccctgtttacttcttcatggttgatcctgatttctatttcagcttctcgttgacagagcccaaactttcaaattctccttcctaactattgtggtgtgatgcatcaaattgcacatcatcattggggagctagacatgggcaatcacaaagtgagcacactgttcatctgatgtatgtgtccccaggacactccatggatgctgaaatcattcccttcatgtctgctctggtgacatctggaagtcaccgggcagtaaggctggcctactccaggccatgggtcaccacaaaattataaaggaaggggtgttccttttccacatttcgtactcctcattgatcatggtcttctaccgagtagtcaaaggttgcttcctatagtcaccagtgattgctggtgaggcccagaatgggcatgggagaaatcttggggctatatgttgtgggaggggcaaggagactgcccacctggattgagagtggctcaaataagaggaagttatctagtagcctggagagaggaagtcaaagagccaaggaccagcctgtgtagggctcactcctggctctcaggtagctttcttcttgctgtcttctttcatggcgggtaggaagaggtcagggtctctgctgtctctatcaaggtatggatgttcttcttaaaccttcgatgttatattttaaacccatttagctagcccaaagccccatgtccaaagcctgtcatgacgctgaggggtaaagctgatatatgagtcttagggaagggttacagccacagcacatgaactatttcatgtaacccctcataactccatggcaaaggctccagtgagggtgaagaagcttagaaagatagatgtgagggctggagagtcagcaattaaaagtactacctgttcttccagaggaactgggttcaatccccaacacccacacgacaactcacagctgtctataactccagttccaggggatccagcaccctcacacaaacatatcaaacatatatacaggcaaaacaccaatgcctaaataaataaataaataaataacatgtatgggggttgagacagggttactttttctacccttggctgccctggaattgtagatcaacctggccttgaacgcacagagatctgactgcctctgcctcatgagtgctgggactaaaggcatgtgccaccattgcttgactcgttggaggtcttaaatctatgaatgacaggctcctcgccacccagaaggatgagacaagagtattgccacacatctgaagccaacctgggctacatgacaggttctaggccagcctgggctatgaagtgagttgccatctcacccccatcccacccccactccccgcctcaaatagcaactaaagtcttggctcctggggttactgagctgtcctgtttgttttaagccagttgatctgaaggaacatgtgaacgtgaggagcatgaagaggtatacaaaagaagagacatgtttgcaggggtgtgtactgtgggcacaggagagggggaacattttgacaaagactggttcatactcaggaaaggcggagggagtcatttggcaggaagcaatcctggagtgttgggggtggagtttggaattatgatgtcaactattatagagaaatgcttgactcatccttcctcgccctcttggccttgctcccaggtctcgagcccctttactgacaccagcaggttcccccccccgcccccccaaaccggaagaagagtcaaaaagaaagaaaacaactaaaaacaatgacttctcttcacacctcggcaatgggagtcagaccgatctctctgtcggagtccagccagagtgctcctcccacgcaaagtcagtgctgcgagagtgagcttcttgccagtcctctgccgcctaattaactcccagtgttctgccggcagtgccagccatgatccatctccattcagaaaacattcttgtaggttctcctctgaagacggatctgtggagggtgctggagaaagaaggggctcttccagtttcttctgtccttggaaagttgtcagctgggtgatgctcagcggctgtgttgactgagaggtggattctgggttgtacacagcatgcagggtgtggcccatgaccgaaacagacccattttcctcctcctcctccctcatcctttctgcagccactctttgaatgtggccactgggctcttgattactgtcaaggaggaggctcaggaactctctgcagccaatgtgttgaagttgaagtcctgaatgagagtattaaatacacacatacacacgggatcaagagcaagttcacatagggtctctgaaactaataatacttcacggacactgaaacattacacaatgccaaaggaacgtggtgatcttcatggcagagaagcggggaagaatcaagaatgtttcctgttgtgactatatatccctcttctaagcattccacgtacatcaagagactctgtcaagtagcccaagggataggtactattatatctattttattttagagacaaggctctattatagctcaaactggctatatagagtgatgttcaatgcctaattttcctgtctccatctcccacctgctagggttttatagatgtgtgctaccacgccgcacttttgtcttcctgtgacaggtcaaagaccaagaggttaaaggacttggccagggtcccataggaaatgatagagggcgattcaaagtcagccttcagaactaccaagttaagctgcctcctgtgtgtatgctccattggagcctttgacataccctctgactcccacccccctagagaattatggttgcttgccttaatgacagaaaagttactgccagagactgtaacatacatagtcgcgcgtgcacgcgcacagacacacacacacacacacacacacacacacacacacacagctgaccacacagtaggttcagtgtttattgaatgaataaatctgggaaagcataagtctgacgcatcgactatttttccctgcctagctcactgcccttttttttttccccagatctttccaggattaagttgtccagcattttccactctcatgttaacctttgtacgttttctgcttggacaaagacccgtaaacgaacttgaaggatgcgaacactgcgtagagaactgtttgtggacactgggtccagtacaactcctctttcctttccagaccaatgaggaactcttgttaccccatggtccagtttgccgtaggagtccagttctgttcctatgttgtttggatgcttggcagactcttgattgtgaaaccaggtccaaggtgatccatgagtccactgttcctcccttcccccatcccctcttgtggagaaaacatttttcactagagagacgaagcatacaactgcaacttcttaattggaacacagagaacttgtcaactttgttaggtagtattgatggtgagatttcttgttaacaaacaaacaaacaaacaaacaacctgggctaaaaggacagaatatttggctttggagatattttggaaaatcaggtaggacagtagacaggaaagcactgtttgccgggcagtggtggtgcacgcctttaatcccaacacttgggaggcagaggcagggggatttctgaattcgaggccagcctggtctacagaatgagttccaggacagccagggctacacagagaaaccctgtctcgaaaaaccaaaccaaaccaaaccaaaccaaaccaaaccaaaccaaaccaaaccaaaccaaaccaaaccaaaccaaaccaaaccaaaccaaaccaaaccaaaccaaaccaaaccaaaccaaaccaaaccaaaccaaacaacaacaacaaaaaaaaagagaatgcactgctttgttaatctcaagttggcaaagtcaaccaactctgcttcgcatcgtggactaaaaacgttttattaaaccggcagtcagattctctggtccggccaggggcttcgcccgctgtcgttgtttgggctacagattactccagcctggctctaggagtcgagtcggggtcagcgcccccgatcctcacagacgccgccttccgggtcgctgaccctggagccggagggcggggccgcgccgggtggaagcggaggaagaggccggcgtcccgggagcgcgcgagaccgtccgcgtgaacgcgcccgcccgcccacccgcgcgcccgcgcccacgcccgcgcccgcccgcgctcccgggaagtctcgcgatgcggtagccggctgctcctgctgcgggtggctcgggctgttgctgtggttgccggagttgcggcggcgacggcggcggcgctggcgcgggcggcggcgctggcgggggtggcggccccggcggatgttgacattgtgttgttgttcctgcccacggtaatggcggcggtggcggcggcaacggcggcggccgggaccaggtctcctcagtagccggagcccacactgccgagcgccagctccgcggcctccgcgcccgccgcctcaccagccgttccccgcggccgccccagagccagggccccgggcggggggctcgccggctcgggatggcggatttcgatgaaatctacgaggaggaggaggacgaggagcgggccctggaggagcagctgctcaagtactcgcccgacccggtggtggtccgcggctccggtcacgtcaccgtgtaaggccctgcgagggctaggacgaggacgggtggcgaggcgcgggcggggtgggccctgggacccctgggggtcctccttttcttaaacccccgtccccggtgactggcgcgggacgggggccttgggggaagctccggcgatcaggaagtgagaacttgctctgcttccatttgtttaggactcccaagtggggacagacactgcctcccctccctcccacagccccggagcaggccccgtggcccgcggggatgtgtggggtcccagccgggaagatggctctttagggtctgcctgatgggccatcggtacaggctagaggtgcacacactcacacacacacacacacacacacacacacatcttgtgggatccatctttgtaacaccccccacacccccgttattctttgggactctgcctgacttacagcctattgacatatggctcagaggtcagatctgaggtgttaagatcccagtggcagttggtaaatgagattcactgtcgtgtgtctatcacacataacacgtaggggcttcccagttcctcaagagtaaatttctgcaaaactgattcgagttgctgtcaattatgtatgatagaagtatacaggtggacggaaaaaaagaggaggatacatctgtttacaaggaattacaagtaccgagtttnnnnnnnnnnnnnnnnnnnntcacgtcaccgtgtaaggcccggcgagggctaggacgaggacgggtggcgaggcgcgggcggggtgggccctgggacccctgggggtcctccttttcttaaacccccgtccccggtgactggcgcgggacgggggccttgggggaagctccggcgatcaggaagtgagaacttgctctgcttccatttgtttaggactcccaagtggggacagacactgcctcccctccctcccacagccccggagcaggccccgtggcccgcggggatgtgtggggtcccagccgggaagatggctctttagggtctgcctgatgggccatcggtacaggctagaggtgcacacactcacacacacacacacacacacacacacacacacacacacacacacacacacacatcttgtgggatccatctttgtaacaccccccacacccccgttattctttgggactctgcctgacttacagcctattgacatatggctcagaggtcagatctgaggtgttaagatcccagtggcagttggtaaatgagattcactgtcgtgtgtctatcacacataacacgtaggggcttcccagttcctcaagagtaaatttctgcaaaactgattcgagttgctgtcaattatgtatgatagaagtatacaggtggacggaaaaaaagaggaggatacatctgtttacaaggaattacaagtaccgagtttcctgtaatccggtctgttttgggacacggacctaggttggcttctttgataagggcccctgtaaggtttattagcaacatcaaaagtcccaatattattcaaacaataagggatgaaagcattctgaaaggtcgtgactaataaaggaatgtagacttggggcaaataatgagttgtccggaagaaggaagttttgtaacatttccctgataaaatccggagtttgtacaacttagggtattgatactcctttgcagctgctatctccagttgaaaagtcatcgctcaaacttcctgtacttgcatatcactttatcactgatagaaaaaggcagcgagcctgaagctgtctggagcgcttgtcattgttttttggtgtagggtgagtggggcgtgctgtgggcaaggcggtcaaacagtgaggctcctcagaagatcggcccttgtgtagtcatcctgactagccttgttgttgttgttggggtgtgcttatgtaacaccttggtgtcttcgcacctgttaacgtgtgcatttaggtgatttaacagggtaaaaacactgcataagcattgtttcagtacctggataaggagatgggacttcgcaccataataactgctctgttttaactgtcaacacaaacttaattaaggaatatagctaattatgaataatacagtttaaatgtatatcataatgcttttagtgttataacctgctatttaatttttagtttaactcttaggacttttttctttttcttttgaacttaaggactatgggtgcttttaaaagcaattacaaacaaacaaaaaaccgacacagtgatagtcccagtactcaggaggcagaggcaggtggatctgtgagttgcagactcccctggtcttcagggctacataaaggatttctgaactttttcatgttgtctgtggtcatccttaaactcctcctgtcaaatcaaagctggcagaaatttatttgcagaggttcagctagggctggagatgtagctcagtgttagagtgcttgtcctgggttcagagtaaccaaataaggttcaagtgcagttgtcatgtctcttctgttcaagaagaagaaaagctaaacatgttgttgggaaatagaatagtcaaagtgctcagatagaaagttggattgtagttgactatttggagtggttaacaagtgtgtgaagtaattattagtggtcttttcatcttgtctttcagaatcacctggcttgtgctcaggaactactagcctttattattataagcattagaaataaagtacttccatttgcaggactaacagtcatttagtctagtttatctgcccattaagatcatgtggggagcatccgctggtgttccagccctctttttccaggccagtggccacatatgagtggagctcttgttcatgaataggcttggatggggttggaggaaggtcttggaggtggttttgattgtacctcggaatctgctgcagacactagtgatggtggtgtttgccacctttgcaggaagccttagtatgtttgtgacctcccttagacacttctgataggtagtaaccttcctctgccacttttatataaatcaatcacttgtgtctcctcagttcacaggatgacagctttagttcatacctttccagattaaggggtgagataatgtatacagagaatacgtgagtgtgtgtcttgtgctcaggaaacactagcctttgttagttattaccctcctcaggtggcgctctgctttgagaaacatttgtgtaaaatatagattaagaattcaacattgccattttcaaaccaaaccgtggttcatttagctaattctctttttactttgaaccaacttttggtcagcaaaagccaaaccctgttttgtggtgatacagaattctataataatgtaaagcttatgtatgaccatcatgcataatgttaggcatactagactatgtagccaagtttgcacctacaagaggctttgaaatttgtgcttatatgttataacggtttcactttccttttcaagtataatcggaaaagtgattaataattacagtgaaccatgggctggaaagatggctcagcagttaagagcatttgctgctcctacagaggaccaggttcggttcccagcacccacatggtagcttacaaccatccataactccaattacagcaggctcaacaaaacactcatacacaaagataaaataaacaaatctttaaaaattaaaattatagtaaaccacataagcttacttctctttttgctaaggagttggttaaagcatttctcccttttacttttaaagaaacaatattataaatggttacagtattgtctgtctgtaatccaggtcagactgaaaagattcaggtctgcctgtgtgcttgcttttgcagttgagcctgtcttgtcttgtcttgtcctttcttttcttttcttttcctttcctttcccttctcttctcttctcttctcttctcttctttctttctttctttctttcttttttttttttttttggtttttcgtctaatttttcttaataagctcactagtactctaatttgagaaatcattttattcttttgtgatacgttctttctagatattctagatgagtaatgttttttatttttgatttgcatgtgctaggagaaatcttttgaagaaacatattgaagaaaaaaccatttatgggaaaagaaaattataaattcccatggtttcatactaaatacatacctataacttggaagactggaagaagaaagaagtggcaaacttactagatactgctggtcaaactgattgatactctttattggaagggcataagcaatgtaaaacacactgacgtaactgatccgtatttatagacagtcacagctcaacatactgctgagtctagaggaaccagtgtgatcattaccagacatatcacataatatgtcagtatttactaattttagtccaacctatttcttttatactctaaactaccttcattatgttgtttgatgggatagaaccacagcaaagccatggtgcccaagatcagccagcttctagccagttaggtttagtagttgttggtagctactcagaccatgttgaagaacagtttagccagccaggggccaggcccagaaactgtgaaagggacatacaaatgactttgctggatggcactggtttataattttaatgtttgtagaactttatctcagatttcaagctgtttttgagcatattctttactctgtgtgtgtgtgtgtgtgtgtgtgtgtgtgtgtgtgtgtgtgtgtgagggcatgtgatcctgtggggaaggcatcttccctatgggctcctatgggtcaggcttggcagcaagtacctttgcttactgagccatctttccaaccctactttgatgtctcataaggatgataactcttaaggaatgtgtttgtataaaagaatttttaaaagttgaggaaatgaatttaaaagtaattcaaagcttgtgttagctgataatctaccattgttgtgtgtataatagtcattggtatcttatttcagactcatcccgtatctgaaccagacttgaggctctcctagagtaggcctcatatttgatttttaacttgagttttctcattaatttgttcagtaaaataaaaccctttaatcccagcattcaggcaaaggcaggcaggtctcttgcgtttgagcaagattggtctattttagtgagtttcagaccagccatggttacaaagagaaatcctagcttatgaaaaagtaaataaacttaaacaaagtaaattacagaggcaattagtgtgatgaagaatatgaaggaagacaggctatgcatgtgttttaataggacaactattcaattttaatgggtgaactttgttgaagaaatgagaacaccagagccagctagtgtctcagtgggtgaaagcccttattgcacaagcctggtgaccaggctgggtccctggatccctggaaccacacaaaggtggaggggaagaactgacacgccgaattgccctctgaccccacatatccactgtggtacacattctcccccctcccccccaaaataaaataacataaatgagatatgtggtaatgagctgaggtttcaaagttttactgtacttgaacttgaaaattaacatatggtttgaattcagaggtttagttagatttgagcttatctagtgtgaaatcgacaaatactttaatttttatatgactggctaagaagaatacagggactaaatcatgaaaaataaattgtgcatacttatttatgttgataaacaatactccaaacaataacttaaataatacagctctaaaattttgagagacaccttgagtttatactgttactatgttacaggccctgagctgaggaagagctcagctccggaatcttttaaattagatgtactgactgatggatgtaatgccagtggagggagggagaccactgagagcttgaagctagcctgcaatagagtgccgaacggcctgcctgcatgcctctgtttgtttctgtctctgtctctgtctctgtctctgtgtgtctctttttgtagcctgctctgacttgaagctcaaactatcctcctgccttagccaccactcctggcaggtttttaattagatagctgtattaaattttgttctcagcaaggttaagccttaactagaacttgaacaactgatgctcctgagcatctgtacactactgtactgattttccgtagaagattcttttgctcacttgacccagccagagtcatcaggctgagagtctaggatatgtgtatttatacaggatcttgataggctgctcttggactcctgagctgactatggtagtttagccttctgagtgcctaatgagactctatgtgtttcttgtatcagacatattttatacataatggatgatgccctggaaagatgccagtattggtttcgatccttggatacgtcctaattgaccatagacgaacttctctgatcttctgtttgctcctttgcaaaggggataatacctactttggaagttaggtatgagaatcagaagtacaactgtaattttatgacctggactcatcatagggattcaacaaattaatttttatcatgattttatttttatccctgtgtacacatgatttcattatttttttaatgagtattttttattagatattttctttatatacatttcaaatgctatcccgaaagttccctataccccccacccccctgccctgctcccctacccacccactcctacttctaggccctagcgttcccctgtactggggtatataaagtttgtaataccaaggggcctttcttcccagtgatggccgactaggccatcttctgctacatatgcagcgagagacacgagctctgggggtactggttagttcatattgttgttccacctatagggttgcagaccccttcagctccttgggtgctttctctagcttctccattgggggccctgtgttccatcttatagatgactgtgagcatccacttctgtatttgccaggcactggcatagcctcatacgagacagctataccagagtcccttcagcaaaatcttgctggcatatgcaatagtgtctgggtttggtggctgattatgggatggatccccgggttgggtagtttctgcatagtccatcctttcgtcttagctctaaactttgtctctgtaactcctttcatgggtattttgtgccctattctaaggaggaatgaagtatccacctgttggtcttccctcttcttgattttcttgtgttttgcaaattgtatcttgagtgctctatgtttctgggccaatatacacttatcagtgagtgcgtatctaatgacttcttttgtgattgggttacctcactaaggatgatatcctccagatacatccatttgtccaagaatttcataaattcattgtttttaatagctgagtagtactccattgtgtaaatgtaccacattttctgcattcattcttctgttgagggacaatcctatatctgatagggggactaatatccaatatatacaaagagctcaagaagctggactctagaaattcaaataaccccattaaaaaatgaggtacagagctaaagtaagaattctcaactgagggataccaaatggctgagaagcacctgaaaaaatgttcaacatctttaatcatcagggaaatgcaaatcaaaacaaccttgagattccacctcacaccagtcagaatggctaagatcaaaaattcaggtgacagcagattctggtgaggatgtggagaaagaggaacactcctccatttctggtgggattgcaagcttgtacaaccactctggaaatccgtctagaggttcctcagaaaattggacatagtactactggaggatcccgcaatacctctcctgggcatatacccagaagaagttccaactggtaataagaacacatgctccactatgttcatagcagccttatttataataggcagaagctggaaagaacccagatgcccctcaacagaagatttcattattttttactgtttgaaaaaaagaaatcatccaaaatgtggcttattactttcctgctttctttttactttcttttcttttcttttcttttcttttcttttcttttcttttctttctttctttctctcgttctctcttcctctcttcctctctttctctcttttttcttcttttttttgagacagggtctctccatgtagctttggttatctttgaactatgagaccccccccccccccttcctgggaatttagttcggtactgttttttctactttaaaacaagatcttggacatgaaagcagatgaccagattgactaaaggaatatttaatccaaagacgaccttatgggagggtccctggaggctgtgttggtttgagaactgcccttttccaatggcacagttgatctgtgtgggctgctgctttgcttcctgccactaaataaactgttgtactggccagtgaaacattccatcttacaagaggactatataaggaggcggttactctagattctgaatttaagaactaaattttttttggtttgtttattttgtttttctagacagggcttctctgtgtatctctagctgtcctggaactagctttgtagactaggctggcctcaaactcagagatccacctgcctctgcctcctaagtgttggggttaaaggtatgcaccaccacggctggctctaattctttattaccaccttatatttggcatatgtttttttgtttgtttcattgttgtttccaaacctgttttatgtggtattggggagcagggcccgggcttcatttactctagacaagtactaccaattgagctgtgtctccagctccacagatactccttaaattcccatttcatgtcaggtgttatacaagctttcaaaagacataaagactttcccatcatatggtttaccgtaagtagttgagttataaatgaagaattgctgtgaagatgaccagtgaagggatctatgatggaaagtaatgtggttgggagaatggcattaagagataaaacattcttatgaagagctgagtctagcttatagctagaacgtacagaaaacaggattgtgtcttgaaacaagattggagagatcagtatgggccagagaggatgtaaaatggtttgaaaggttcttccccaacttgtgtgtgtgtgtgagagagagagagagaaaggggcgtgggagggggaggtgcagagaggcagagagacagaattagggttacttccagtgttatgaatgacagaccatccctaagagcatagtctgtactgtagcggctccactactgaggagaatgttagcattaaattgaagaggctgctgaagcaatctgagtgaaacaggacagtagcctggctgggttggtgggcaatagttacgtaaaggaggtattacagttttaggtagaaagcatcaaattttacaaaccttttccataagatagagaaaaccagtagtagtgtttcctttaccttcccacttgtgtatatgtgattcatttgatttgatttttggctctgtgatgaagtcaaagaactgggtctgcccttaataagctgctttgggaccatttttaatgacatatttggatctcctgtcgccatgggtgctaatatgccaagagagcagctaatataccagaggagcttcctcataattttgaagtgaggatgtttgtggaatgacattcttcactatggtatttgtggtgtttgatggctatttgtttcttagatttcagggaaagatctacatttaaagctgatttggaatctctagggctgaaatgttctgatgtgtcctgaaaaaaaaaagtgtctttttcttatttatttatttatttgttaatagtttatgtgtgtttttcctttttctttttgcttccttgtatgtctatatgagggtgtcagaagccctggaactggagttacaggagtgaactgctatgtgggtgctgggaattgactcaggtcctctggaagagcagaagccatctctccagtctccttttattttcttatttttttatgttctttcatgtagcttacttttggtagagatggctagactttgatataatttcctttttttccttttgttgattacaagtgtgtaacaaagttcccctggcctggaattcattgtagttccagctggccttaaccctgcaacattcctcctgcctctgtttcccaagtgctggaattgtaggtgtatgccacactgagtggcaaaagctttctgtcttttctttgatcttgcattgtggttatgatgaagtaagttctgggtttgttcagtgaaggaattttatatactcaaccttctttatctgcctttttataggagtaaacattatttgtagttactggtttggaggtctattgtgataattagctttccattaccgtagcaaaatgcctagaataattaacttagttatattttggcttacacatggggtggggaaagtgaaggaggactgactctaaaagtgtcctttctaccagcagtcctcttactgctctccagaggacatgggctggattcccagcccccagagggcagcttgcaactggctgtaactcgggtctcagaggatctgatatcttattagatatcatcttagatgagcctaaacatggttcggagtgtggttgcaaagttaaaatgaaactagtctacaactgcagaggcttgtgtcttctggtagaaagcattctgtgggtgtgtgcatgctatgtcagtgcctgtctgtctgtccagctgcagggggtttgtatcttctttcagtccttgttgagctgtattgatattcaaacacatatgagatggctggtgtttaaagcatggtttataaacattaaagtctgttaatttcttccatggttatgatttcatctccaaaaaatagcagaaaaaatatgattccattaagctcaaagtctaacattaggaaataggttcttctttcatttactgtctgtataacccatgtgcttagtttgagtctgaaaattttagttcatttgtgcataggtcttgtcatatgatggaaggtaaaattctgtgagtatgagtttctatacagtctgagtgtcggagaggaatgctaggctggagttttttctatctaaaactgaatacataatcctctgtttaaagcagcttcaagtatagcctttttgtttttagttgatagtagacctagtgttatttaaactaacaaaattttgaaagatttttgtttgaatgtgtgtatatgagtgtctccatgaatgtgtgtgtgttgcagaggtgagaagaggtggtaaactctctggagtggcagttactagctctcagaggttagaagaggttggtggactctctggagtagcagttactggccacaggtgtaggcacttgtcctagtttgtctctgttgctgggtaaaaaccatgaccagagcatcttgtagggaaaagatttttttgttttgcaggttacagtctgtcttctaggggagctgaggcaggaaccttaaggcagaaactggagcagagaccatggaggaatgctgtttactgacttgctcccatgacttgttcagcctgctttcttatataccccaggaccatctgcctaggcatgtcaccacccacatcacccacagggagctgggacctcctacattactcattagtgaagaagatgcccacaggtttgccttcaggccagtttgatggaagcaatttctcaattgaggtttcttcttcccagatgacactagcttgtgtcaaatttacagaaaactagccaatacagtgtctcatagagcagaaaatttgacacattttagaaggctttcagcatccagtgtgtcaagcaacccattagttctctttgaaacctaacaaggtttgtttcttttgcctaagacttactacctttttcttttacactctgctttttccctttacagtaaagcctcactggcacatgtgccatgaaaatgcttgtgaaatgtaattcagctgtgtctttctgtatcagcttcctggagccacctctcccagagttctttgagtagcctgcagcactctccctgacctggcttacctaccgtgtgaacatgtctctgacttctttcttatttctgcttacctactccattctcattgtactggcttctcttccatttctgaattattctaggcatatttctgacctaggtcctttgtactgactagctcttttttttttatgaatacttgcttccaacatccagaagctaggtccgtatcttcagatctgtcaaggagaagcttatcctcctacttaaaatcacagctccctccttagcatgtacagcatctttctttttccataattgtattcgtcagagcatgagttagccagacatgtaagagcacaaactcttatttatttgcaattaagatttactatgaagctgtggctggccttaaacatcaagtcctcttcacctttcttaatcctgatgtacagcagacatgcacctttacatcttagtctagaatataaacttcagagaaactttttgtaaaaagagagatctcagtaaacctttttataagaataaataaatacattccttttttaaaaaaattatttatttatgtatgtgagtacactgtagctgatggttgtgagccttcatgtggttgttgagaattgaatttttaggacctccactcgctctggtcaactccgctcgcttagtccctggttgctctgacccaaagattcatttattattatacataagtacactgtagctgacttcagacacaccagaagagggcgtcagatctcattatggatggtagtgagccaccatgtggttgctgggatttgaactcaggaccttcggaagagtagtcagtgctcttacctactgagccatcttgccagcccaataaataaattcttaaaacatttactgttgtatagaaactgtcctatgtgtaaagtgaagcccaaattttgcagggtttgttttttgttttttaatttgaggagttgggtatggtgaggcacccctttaatttcagcacttgggaggcagaggcaggaggatccccgtgagttcaaagcctgcctggtcaacatagcaaactcctagacaaccaagcctatccagagagactctcaaaaaaacaaaacatactggggaaagttgggctcatgagatggctcagtgtataaacatgattgttacccaagcctagcaacctgagtttgatccctagaacccacgtaaaggtgaaaggagagacccagttccaccaacgtgtcccttgacctccgtatgaactctgcagcatggatgtgtccaagaatgcacactatcttagattgggtttttgttgttctgctgaagcaccatgagcaaagcaatctagggaggacagggtttattcagcttacactttcatatcattgtgacatccacatcatcattgacagacatcggggcaggaactcagcagctcctgaacctagaggcaggaactgatgatgcagaggccatggaggggtgctgctaaatgcttgctcatcatgttttcctcagcctgctttcctatagaacccagggtcaccactcacagcaggttggccttctcccatcattcattcactaagaaaatgccctacagccagatgttagggaggtgttttctcaattgagattccctccttttacctaactctaacttgtgtccagccagcacgaacagcataccaaaagtacacacacaacacagataaagtttaagaatgagagtgaggggttgagacgggaggcttactagttctgtgccacactggcctatatagtaaggccatgcgtccaaaataaataagtaagtaagtaagtaagtaaataaagtagagctggcactgggatggagcctgagagagagagagagagagagagagagagagagagttgagagagagagagagagagagagagataaagagagtgagagagcgcaattgccaggctctgggtgtgagccctagcaactgtaaaacccagaaacttaggaggacggcacagcatttaccctttggtctgctgtcttatcggagacaaatacaactgaagggaagatttgcttttctgataatatattgaattgatacttaaaccaggattagaattcaagcattccctctgcattgcattgctcttccagctgcaccacattagctttctgtacttgccaattcttgttttatctaattggattgctggctgcaagctgccatttcagttgaaagcctgctgttactgcttagatttcttgaaatcaacatgttttccataccttgttttctacattctacctcatgaccttggttggttaaaaagttggaaattttgaggtgcataagagatgcagggggaggaagggctcatcagttaagaggatgtgttgctctaatgaaagacctgggttcaattcccaacacccacatggtggctcacaactatccctagctccaggtccaggtgacctgacaccctcttcagaacccctcgggcactctgtacatacggtgtgcagacatacatgcaggcaaaacactcagaaacataaaataagtaaatcttataaaaaacacaaaccacaaaaccactgagagatggctcagtggttaagagcactaactgctctttccaaggacccaggttcaattcccagcactcacatggcagctcacaacataggagctctgcaactcctgtttcagggggtctgacaccctcacacatgcatacagtcaaaacaccaatgtacatagagtaaaaataaataaataaatttctaaaacagaacaatggagaaatatggaagctagatatagatgggacctcagcacctaggagcgtgctgggattcaggctgcaagagaagcagagactggacaagacagtgttaggaactgtctggtcttgggctagcagaggtcaccaaccccaggttcaagaagaaagaccctctgtctaaagactagggagtggtgaaggagcatagctgaccccctgtttcagcctccgagtgtgtgtnnnnnnnnnnnnnnnnnnnnnnnnnnnnnnnnnnnnnnnnnnnnnnnnnnnnnnnnnnnnnnnnnnnnnnnnnnnnnnnnnnncagagacacagagacagatacacataaaaaccccaaaccaagatgacaaaagtgctttaaaatgccctcttttgtttttggttggtgttttattgttgttgttgttgttgaagacggattctcgtgtagcttctgctgaccttgaattcctgaccttcctgctgccattttggagttctgccattatggatgtgtgcccccacacttagttttgtagtttctgtagtgctcgggattgaatccagggtttaatgtatgctaggcagcgctttgagtgttactgaccaagctacattcctagccctgaggtatactctaaagccagtagagttgtctctaaatattggcatgtcgcttatgcatacatttcctttttgtcttaaaaacaaaactcatttttcttcatattttaactctttttataattataaagaaaagcataaagactacttataaattgggaagttgtatttcccaatgaagtaaaaaataaaacttgggatcatgaagatacaaaaaagggcaaaatggctcctgttttttgtgtaattgttcctaggtttttcttttttctttctattttttgatgtgcatgtatgagcagtgtgttatatgtacttttaaaatgtgtacaagtatgcatttcggtgtatgtgtgcatccatgtgtgttatatgatcttttaatggtgtgtgtgtgtgtgtgttaacatgggttgtcttttcctatatcgctgtcactctacctttatttcctgagatgtaaactcacaggacctgaagctcatacgcttcctcctgtctctctccctcagtgctaggtttgtgggtgctgggcctggctttttaatgtgtatcctggcgatccaaatacaggctctggctaatcttcacagtctatccttagtcttaaatactaatagattttattagagaagtcattgaaaacatggaaataagaaatgtcatccatactctctgttgtttaggattaactatgggatggatttgattttgttttcatatgtaaataattacattaaaatttaggcaatagtattttagttctttgcatttttcattaagggttaatattgggagcattcaccattatcattatgggatcttacaaatctgaatagtgagactctatcagattataaagagcagaagtactcaagggggcttaagagtcaggactctaccatcgtacagctgcacctcagtggctctgatttttttctctgctccctggtctaatgcgtctcatggagatctgcctcccagcgtctgctcgtgcagtgggaactgctgactgactacttctccttcactggacagttgtgcttcctactgtctgctcttcatttttgactttcaggctttgcaattttactgtatcttgacttgaatttaaaccccccccttttttttttaatatttcagcccttacaataccatctatttattaataccttatattcatacatgtcaagagaaaaaccacaaaacctgtgtctgagttgagcaggcttgctgggccctgccagctgctgtgttgctagccagtcctatgattaggtgtgtgctcactatccagagtagagacatcctagttagttgttcaggtaatgggttactgggctttcttgtctagtgtatgtgcttttagctataattgtctagtgtttgtgcttttagctataatacattattacatatgttataattaatatcattgtaaaatgtttctattttaaaattttcatttttaaaaatagcactacaactcagaagcaagggaaataaacattgaacaaatgtttttggttcagattgaaataaattgaagcgagtgggtactagtcatttggtatttaaaagacaaaatgcagtaggaattcaaaacagtgaaagctagaaaatttgctatttgattaatatattatgctttgatactgtggtagctcatgaaataaaccgtcttttttacttacatactgttggttatttaacattgtgcttcatgcttcatcattctataaaagttttggttctactgggaaactctttctatgctaattttgtaagttgctcattgtgattatcttaatgagcaacttacaaaaggtatcttagaccttcactctgtctccgacactctctgagggatccatgttctgttcacaccacctttaagttagatagtttaagcatctgtgatgttggcacagtgacatataataacatattttttcctttttgaaaacagatttggactgagcaacaaatttgaatcagaattcccttcttcattaactggaaaagtgagtgtctctcttattgttattaatctactgtttctatatctcaaattattttctcatagaaatgagtaaatgtgtgctgagacccatttattgtcactcagcatctcagtgttacgtttcttcccttcctgtaggtagctcctgaagaatttaaagccagcatcaacagagttaacagctgtctcaggaagaatcttcctgttaatgtgcggtggttgctttgtggctgcctgtgctgctgctgcacgttagggtgcagtatgtggccagttatttgcctcagtaaaagagtaagttgaattatgtcttttaatttacatttagaagtgtgaaacaagtcttacttttaccttttttttttctgtttaatgaaccacactgttctgaatgctatatagaagtaatctgatatagtaaagcaagattaattaaatcatatattcaaatattataaaacagctgtgtaacagtcgtcataatttttatacattaggaaattatagtcaaaaggtgcagccctatgtctgtatgcattaattatggactagaatggtactgtatatttctgtgcccatggacatacttctgaacctctttaaatctgattgatacagctataaaataataatattcacctgtgatttgaatagaattgttgtaaggatacagtaaaatagtatttataaagctcttagctgaacagcttatgagaaattctgtcagcttcaatgctgttttaagtataagagagacagtttaaaggaagaactgtgtactttggctcatggttttagagattttagtcatggactgttacgctggctccattacttctgtgcctgaccatgcaaaaccatcatgatggctgagtagagctgcatgcctcatagtcatcaggcgtcagagagggaaggaggagattggaacaagatgtagcccctgagaacagagtccttcctacccattcctctagatcctatgtctagacatttgaaccactttccaatatgccttcatgttaggaatctatgagtgatttagtctgttgagtaggttgtattccttgtaatccagatcatcttgcagtccacagtctcccaagctctactgtcaactgagctatcgcacagctctcctcttacttttaaatgacattggtgtacgtcagtgtctcctgtgcactcacgttcagtacctgagtctctgtggtctatcctgtcagagttcctggaagtagttacagaggctagtggtcctggttctctgcaagagcagccagtactcccaactcacctctccatcccctaacatacaagcttttggagggagtccttcaaatctaacccataacagaagttgtcaataaggagtgactaatattattactagtactatgagagtacccatggaggagataaaatgcttacaggaaaataatatgggttattttatttttgtactttacagtttctctataatgaatatacactgactctgattaggaaaaatcattggaagacctaattttcattgcttataatgaaaaagttccaagatgttagttatagatatgccaaaatgatacaaatcaaaagttggttgggtggtttttgttttgttttgtttttgaagacattgttttactccttggatttgactggcttgaaactcacttcaggttagtcttgaactaagagatctgcctgcctctgcctcccaaatgctccaggccaccatgcctaacacatcaccattgtttttgttatcttaactattatacttacacgtgtgaagttgatgtaatattcagccatgtatggtaactcaggtatgaaatcctaacactcaggctgagacaggaggattgtgaatttgctacatagtaagttaaggccagcctggaaaaccaaaggaggggggcaggtgtcaaccaatttggcttgaatgtttttctgtggaaacatttaatttttgtgctagataatggcgaggaaatgaaggaaatcacatttaatttgttacttgacttctattatagagttagaggtatattttactgaaaatttttgagctgatttattgctagaaaggaaatgatgctttcataatagagttgtatattattttttataatatttaaaatacttatatttctcataaactattttattatttgtgtgttgaacatgggaggtgcaggtaccgccagaagtgtttaaaggccaggggacaacactgtgcagtcagttctcttctgccgttgagtgggtttcgggtggatctcaggtcattgagcttgtgcagcggaagggttttttttttttttttttttgctggccctactttcttagagatttttttacccccctaattcttgccagattgcctctaggccacaaaaaaactgtctggcagtgtttggattcacagttgtattttctgattttctttaggctctgtctctcactgccttcctcatttcaggccttgctgttgtctgagtggctgtccaggtcatatggttacggtggtgggctttgtttgttggatctggccttgattttcagatctgatcttatctttttccctccctcccnnnnnnnnnnnnnnnnnnnnnnnnnnnnnnnnnnnnnnnnncctccctccctccctccctctctccctctctttctccctttctccctccctctttcctcccttcttttactttttaaatgagtaatacaagagattttaatatgtggatgctatatttaaaaaacaaaagtgaaaccttatagttctctatacatttcctgccttgagtataacttctctgtaccatgtcatgaatgtatggagagtactagaacacctttgtaagatgggagacaagatagcagggatttccaaccctcattgtcatggaccactctgctagtctaataatgctagagcctataaatactattttagtataacatttaattattctaaatactacattaatcaatattttagattacaaaaccccaattatatatcaaacaactaaaataaggaactggaaagtatttgaagatgtgagaaaatgctgttcagtgactgcaatgacaacattctggtaatgtgcaagctgcgagggcttcactaagaactaggaaaggaggatgtcataaaagaagacaaaggccacagtatactccaggcccatccacactggatgtcccatttacctatctgttctcctcataacaagactcagggagaatccaaccaagtgacgacccccttagagcagaagcagccagtcagtcggatctcagatccttggggtttggaggggaaatgatagggttaaaactagtgctagggaaatagaaataagagtgcctacaggtgggatatgagacagccaaagtaaccaaagtagaggaaggacaggcctctatgaactacaactagtctctgcaggttccttttggcttatttggaaccccttcctgaagaatatagtaaggaattattgttctgtcccctagcaagttcaactttgtagtagttacacttttatatgaagtcctagatctaacacatctattgtaaaagaatgaattgtgggtaaggatgatgtctgtgaagcctctacctattccaggacagtgactaccctacagcgtaggcaagagaaggacaaatggtagacccaaactatagatctagctttgagggacttgttcctccatcttggcttactctatgcttactctaagtgtgtactttcctgccagataaaaatagactttgtttgttctaaaacaaagtaaaatgccacaaaacaaccaagaaacctctaaaatgctttaaaacaaatttatcaaattgttctttactaatatatatgaaataaaataacagatccatggtgatctggtctgatggaaagaatctatgatttctacaagtgatcaaagcaccattgctgtttggtcattccagttagtgttcatattgatagctaaagaagatgcatttcaactagagcttaaaaatcaagatgcagggctggagagatggctccgtggttaaggacattgtctgctcttccaaaggtcctgaactcaattcccagcaaccacatggtggctcacaaccatctgtaatgggatctgatgccctcttctggtgtgtctgaagagagtgacagtgtacgcgcatacataaatcaaccaatcagtcaatatcaagatgcagttttattcctgtcggttttgtggactctgacagttctatctaggcactccttattaagagaccttgaaggggtagagatatagtccagtggtaagacacttgcccgagattgcaaggtccattgtttgattcccatcatgacatgcaaagacatacacatatacttacacacctacacacccgcacacacacctacacacttacttggcattagtattttaaaagtgggctaaaatgcggcctggtgtttagcttgtgaacccctcttgtctctgcatgtgtaacccagaatctttttacatggctgggattttctctgactccagtataagtcaggactaaaagtacactttattatgcaactgaaagctcatcatcttcctcactgtaatcactaagtaattaaatggctttgcctttaaaacgtgatgccaggtggtggtgatacacaacttttatcccagcactcaggagaggcagctagatctctgagtttgaggccagcttggcctacatagaatgagaccagctggggccatactgtgagactttgtctcaaatagaacaacaacaatctcctcccatttccccccaaaaaagccctgactccagcttggttcccctctcacctatattttgttccacagagtctgttaacaatctgctattatcagttatttttatgccttccagattgcctttcttttaatactaccttaggttttgagaattattttttataatttaaaaaaagtaaatttccattgtagtgctttataatttttatgaatgcaactttacaaagctactcataatcaaggtacatagcattttttttcccaaaaagccttgcttatactgatggtcactgatctgtctgtcctgcccgtatagttttgtcttttctagagtattgtatcgtgaaattatttagtttatgtagcctttccatcctgactttttttgttttagctcagcacatttgaaatgtatctatttagttttatatattagtggtttgttcctttttcattgtaagaagtttttactatatcttctccagtgtatggctgagtctttcacagtttgtttaaccattgtcagttggaagacattggattgtgtgtggctttagtgattctgagtaagacttgctttattttcatgtgaacataaaagtgagattactgggtcacatagtaattgtgtgctttattttaagagaaacttgtaaaaaagaaaactcttttccaaagtggcaagtacttttgcattcacacaagccttgtgtggagttgcagttgctcagtgtcctggccagggcttggtagtggttagcagtggcagtgttctgatggtctgctgtggtacttcttgtcacctcgctcttgctaagtagtggtagacagtgtgtttatttgctacttgtccatcttcctttttagtattggagggagggctgtgagatatttctcagtggtagagtgccttcctactatgtgcaaggttttcagcctgtagtaccacaaaaacaaaacaaagtaagaaatgaaagagttgaaacaaattgccctctttcccctgtttttaacacagcacctcacaactctggctggcctcagactcagaaagatctacctgcttttgactcaactcccatgccagcatgtgggattaaaggtgatgccagcacacttagccttctcatttatttatttattgtaagagcacggacctacttttatttatctacttgtcattagtttaaacccttgaggatgtagcatcactcagattctcgtccaatgactttagcagaaagcaggaaggttgctttggaatttgacacaagctgtgccactgttgggctctgataatcccaaagtatactgggttttctcagcttgtcaccagaaggattatgttattgtttgctttgaacaaattatatttcttacccaagtagaatttgatttcacataaatactttttattttagaccagctgtgtggcccttttggttttggagaccccatacctacagctagcaaataaatggcctcaaagacttgtagacatatttacctttacaagtccttttctcagcagacctcgtgactccaagatggaaggaaagacatcttgcctgtttaaaactagttatttgttggtatgaggtgctttgtttaagtgatggcacgcttacttagtattcagaatgacctgtctttgaaccccagcactgaagagggcgcagggcaaagaatataaaagaatattttaaagggttcttttattgtttgtttgtctgtgtgtctacctgtgtgcctatgtgaattatgtgtaccacatgcatgtgtgagtctatggaggcaagaagagggtgtcagatcttctggaaccggttacaggtggttgtgagcctcatgtgggcgctgcgaattgaaccccagtcctctgcaaaaataggaagtgctcttaacctgcgagccatctctccaaccttgattctctttaaaatggtgttttctttgttaaattaggatagtgtctcattatgtaacctataacaaggcttgaatttagtattatcctgcctctcagtcttttacgtgttgggagtataaagcatgcaccactgtggcaggctttagactagttaatgtaattctgacgttagagatgtgtcagctctagcagatactagcgtataccctgtctttcctatgtctttggcagagctgacggtttgattttgatgatctagtttatcacttaaaaaattgtgctttaatgccaggctcacaaatcccagtttatattaggctgaggcgtgcatctctgtgagttcagggccagcctggtctacattttgagttctaggccagccagggctttgtagtgaaattttgtttccaaaaagaaaaagaaaagaaaaaaaaaaaataatgcctttactatcatgtctactctttcgcctaaagcaaagtggtgaagattttgatctctcccatattttgtatgacaagaagagacggtcaaagttcatgttttgacatatgactctctcggctttataagtcataatttatgaatctcttactgaatttcattatgttcccttggtgttgatcttaacctcgctgtcacaccgtcttacttactttagcttatttacttgagaattatgttcagtggggcgaatcttgcaaatttgtgtgtcaacacccaccctccttgagttggtgtctcatgtggcccagtctagtcttgagcttacagtgtagcagaagatgacccaaaccctctgatctttttgcctttatttcctttccagttgcaggcatgtgcttattattagggtctgggagccaactctgctctgcaactgagtcagggctgtaccaactgagctacatttctgcctctggaatttttttttccaagattttttttttttttttgatgattagtttttcatgtaaatgttaagttcagcttgttcactgaggttttatgtgtatgagtaaagtttgcctggatggatgtctatgtatcatgtcctgtaaagagaagtctctcctgtcaggcgtggtggcgcacgcctttagccccagcacttgggaggcagaggcaggcaaatttctgagttcgaggccagcctggtctacagagtgagttccaggacagccagggctatacagagaaaccctgtctcgagaaaccaaaaataaataaataaataaaatgagagagagagagagagagagagagagagggagagagagaggtgtctcccatgctctcccctgcaacagaatcaatactcttgatcctgaactttattgatacttttagaatagttcagtgtagacctggagtcctcaatgtaaagacagaaattatatattaaagcctaattgtagaagagaatagcataggccatttttcattgaggaagacgggctttcaggagctggagagatggctcagtggttaagagcagaggacttgaatttggttcccagcacctatgtcaggcagctcatagccacttgtaactccagcttcagggactctgatggcccctttgtggccttcactggcacctacactcagcaaacacacatttgtgtgccacctccccataattaaaaacaaatctttaaaagatttcttacttaaattttttatacaatgtattttgatcatgtttttaccctcccccagctcttctgtcttctccccatctctctacccacccaaatccatgtgttctccctcctcctcctcctcctcttgtatcactggtcaatactcaaactcaacactggacattttgtgcatggtctccaaggagaaactagtagccacaaccaaagacttggaggtttgactgtggtggagtccagaaagagtaggtatgctagaaaagatcatgtttgaataacagaggaagaaataaagcacgctcacacccacagacgcagttctgtctaccagtatgctgttaaaacaggaagacaaaagcgtgcctgaagtcccacccccaaaccttcccccttcctaccctcccctcccctcaccccccctcaccaccaccaccaccaccaccaccaccaccaccaccccacccccgcctttttttcctggtttctacctctgtctttcaggccgtaagtctatacctgggtcctctcccattagctcctacctggagtggtgataccaacctacaaatacttattttatttttgagacaaagttttgctattatgttggttgattttgtgtcaacttgacacaagctagagtcatttgggaagtgggacccaactgagaatatctctataataagatttgtctgttggcaagtctgtgagggcattttctataactctagttctaggggaaccaatgactctggtttcctcaggcacctgcactcatgtgcacatacccagatacagatacacgcatctacacacaattaaaaatcataaagtcatctcaaagagaaagcagagattgagagtgcatatatgttaatgcagcgcgcgagaaacaggagaccaaactgaaggaagtgactgctgcttatttaattctaggtgtgggatctgggcatgtctgctctttccttattaaaaccttattgtgagatttttttttttgaagtcttaaattagtaactctagaaaagtgctctcatataagactgcttgtagctgaacagtatatttactgctgcttcattttaaaggaagtgtctcttatgtaaattaaggtattcatgtggatagtactgatgtttagagataggatttttagtatagagcccaggctggcctaggcctcctgcctcagcctcctcagttctgggatttttagtactcattaccatgccctgtttgattatctgtttttaattaaataaaaatattgcaaatgtttaatagtgttattgggatcttacagcactttactaacgaaccattttcctaactctcagattcaaatgcgtctgtaaggttccagtaacactatgaatgcttaaaactcaacatttgcaattttaacatgtgtctcagcatgatattgttgatgtggtagcttgtagaaagatgtggtctctcttttctgttcagttggctgataaagatttatttattattatatgtaagtacagtgtagctgtcttcagacactccagaaaagggcatcagatcttattatggatggttgtgagccaccatctggttgctgggatttgaacttagaacctctggaaaagcagtcagtgctcttaaccactgagctctccagcccgtccatatgtttttatacatttctattctcttctgaagttctgttttcaatcatttttctcttctgttttcttgactatattaatcatacttttagtttgagttggttatttaaggcagataacctggttagtagcttaggcaacttgcatgtaatagttgacatttctgttaggatagttgcagaagcatattctttacatatagttctgccctctgatggaaaggacacaaggttggtagctctagaatataaccttggtttcaggtcacagcaccactgtactctactgtagctttaagttccttgacctagaggattccatttttgtatgtaaaatgaaagcaatttaagctgcctgatagtcttgttgggagcaaagcaccttgcttggtcagactcctgagtgacaggctgcatacttgttgctttcattcttgcttctccagttgtttattacagtcttattacagcaggagccttctagtttgtccgtctttcctcactaagacaaaacaaaaccttgaactcctttaatggcatttgtatcttaacaaaagttatttgacttacgaagtttttctgattttctactgttacttgaaattaaattttagtttaaaaaaatcttaccaaggaatttttttcaaatattattctcaaatatcaatttccttaaaattttgtgcagcattttatatatgtatgtgttcatgtgtacttttctggaaaaagttcaaaacttttattattcataaataccagtatagccttttaaaaaaataagattcactcgctaacctgatgaaatgtcatgcaactgtgcattactgggctcctttaaagtcaccccgagtgctccagctgggcacatgtctccagttgttggggtctccccatctaactgctctacagcgtgtccactcgttggctaaggctgccttactgtaacactgtggctacactatttgaaagtcagtgttcatatgtagatttttagaggagtttttgcatataggaaagaaatttcctttgaggaatcagttcatatttttgtttatcttggcaaattccaggttttgtatgtgtaattacactgagatacactgtctgattttcagctcaccactggaatgtgggatttaacgttaatccagaacaaacagaagtgaatcgtttaattgtctctttaaatcaaagtagttcactccagattatatacagtttccttctgtaagccccaaaaccattgttgtctcacttatttctgagtttccatttgtacacatgcataagcacaggtccttatttaacaactgcacgggttaaaaataaaatcacaagtgctctagtggtattgttctcgttaaatcttaattgatgagttacaaacttagcagtttggatttcaaaatgttttaaataagatcttgaacatttgaaatttgccttgacattgtttaatataatgaacaaatctagttcaaataaattttaattgcaggtttaagttgttgaacttttgtaaatggttgtaaaaattttaaaaaccatttttttccccaagtagctgattgtgaatgtgtctaactggtcccttgtcctggaatatttagggatgtttagtggcccagagtgtgaaccctgcatggcagtaatacttcattccttaggaaggtagatcacttagggacaataacaaaaaggccttagagcaaatcaaaatttaattttgaggaaatcttaattttctattttagtagttttttgtggtttatgttttactattttagggttactttaaattacttctcagttcttctttagaagttaaaaactgtatgccgtatttactattgttgattaatattcttagccatcttatgaattctgatcttttcgttttctttgtaatttttatgttctgattcttttccacggttgtaccaaaggcaacaaaaataaagccaaatgcttagcttaagtctacactgcctgttcagtaattgaaatattttaaaattttagtcactcttgaatagacaagcaactgtattagaactagctaacattaaggaaaaatataactgtaaagatgttgaaatgaaaaatatgttaatattattgtttaaaattgtcattcaaaatggctctgatgaggcaggttgatggggtctagctgcttggagctggcattctcaatcgggttccctgcatgagagcatctcacaaagacttgttttgcttacatggtgtaagctggtggtcttggcccttttaactcaagactccatgtgataaaagtaggtttcttgttggcagcctaggcaaaaaggactggagattcatggtaaagaactactaaccttgtctttccaccccagggtgagtactgaaaaggattaaggccactgtagggaacttgtactgaagcctgccttcactgccctttctcctgttctttcagctaaacagaagagttttagttcccatggctatcaatctgctgtttttctcaagcactacattcttttaagaaagctaatatgacttatttttagaaggtagcctagaaggataatgttttgttggtatttcatttttcatgatttgtatatttttttctgatccatattaacttaaaatattttgagtttgccaagtagtataatcacttaaaactcaattgacaaagtatttatatgatgaggtttctggtctagtaaatagataacaggtttgactgtgttgaattttttatttcattagaatagctatctgacaaccttgtggacataaactcttaactcttatttctagatgactgtaattaaaatgtgctttcttctcactgaagtttaaaagctttgaaatagctttcataatgctgagatgtcatattttccccactatctgccaaattagtattgtatttcatcttgaaaatatattttgatttttgtgaactaaaaataattgcatagtataaaacattctctatggttaaaccttttttcttccatttaatttgatcttttgttgttactaacaaataatttgtggcagtttcttttttactttttaaaaaattattactagaatcactctgctttgtcaccttagtgtgttagaaatgttgtactcagatcaagggtcctttctggctttgtgtgttctcacctgctcctcactgtaagtcactgccatgtcaagtgcagtgatggattgagctgcacgtgcagcggcctttgtcacctgtcaggcaagcaggagagaactcttagagaaagaagcgctaattcacagctttgattcactccaacagtatagaaatactgaatatttagatgattatacagaataggacatagcaaatttttgctttaaaattggtaatattgttggttacaattatttaagcccaaccctatcattaaactcctaattagagtcaaagaataaattcaaagttcctacataaatattttagaatttcagatttatacttcataattatcttttatacagatattggtacagtagttgatataagtaaaagctcatattttaaattggtaaatgccatgtgtatgtgtgtatgtaagtatgatgataggatggcctcactgtatagcatctcttaaatttctgatgacttgatagtatggttaaaaaaaaaacactttgagtaataaatatttgcagaatatagttaagtttttaggaactattttttatgtaattttaatattaaataacagacttctaaagctacttcttcctaccctatttctttaacttagcccacccccttttaaaccatcagtaaattgtatagtaatcttaatctattattaaaagattctcgaaaggaagattacaaggtggattcaggttttgaaatggttttaccattggtttagcagcgggtgggcaggcagatgcctgctcataggagaacctattgccatttttcaccattgatagagtagcctttcagagtcaatgagctctgtcaatgtgagcttgtcaaggctacaacttcatagacctgagaggcggtttgagaggtcagcccttttcaggttcgctgtgatgcaaatgaactttaatgcttaaacaactattggaatttttatgtctgctccttgttcttttttcttcacaaagtcattgacgagacattcagtgctttttaaattggaagttgcattgtgctaaagacctagtacagatttacggagggctgaaagcagttagatcatgttcttttcatggtgcgattagaatcaaatcgatttccctacagccttcagcattcagatggcaattttaacaaagcttgggggctagacaagggacaaaacgactgaactgaatgttaattacactctgcagccttattttcttttgatttggggctgactggcaactaaattaacaaaaagtgtgaccataactgctgccctattttcatttaaaaggagagctgcctctaaaaggctatcttacaaagaagcaagtgagagctgctgatcagcgctaacaagggcactttctcttcaacattcttgccagaaagactgttcaaaactgtaataaattagtcattgacatattattgtcagaaagtagttgattttcttatttttgtgacataaaattggaaaatataagcactcgtggtaatttgttgatagctatgaattataattggcatctatgtgacttcagtgtctatagctgttgagcatgctgaagtgaatgtaatgctgtaactggactcagtagagactttaaataaatcctaatgtttttattaagtcttcaaaaccagctgttcctaccagtttttcacctcactcattcttgcttggcatgcaagtttttatgtgattatcagtacttatttagttacctatttacttatttacaaacatataatatatattattatttacttattcacattcaaaatcagtggccatctcttcaagccaaagctgcatcatggctcagttgatcacgtggcagtgctttctcttccacacctgcagtgttagtctcaccctggctctacgtgttagctctgtagtcacacttccaagcaagaagcatccatgctgtgcagtctccatttcagcagcctagggaagtcagctgctcagctgacgcctggaacagtactgttggattaccaagtggattgtagtctcagatactactttcatggtgctttaaataaaagtctggctctgtttggaaactgcactatccaacatactggttttctcatatagtcctaaaatttgtttggttttgtaactcctttcctcctttattaaccttcaattattatgtttttagacttaccctaaaagccatatgttttttgttagctaatatttaaattattatagttttaaagtagagattaaggaatgctcattactatttaaatactgcaaaatgttcctaaagaagtaggggtttaagtttaaatttggcaaatgatatttgcttttaaggctaatagtttttttttttttaatcagaagctagtaagtgcaaaatattttaaaaatatatgatatatatttaaaagaaaattcacatttgtttacaaactactgtttgtgatgaggttgcttcttagtgctagagcgtggggaatacagaccactcttgccctgtcgtgggtttatacttcttcccttttcacagaaaagcagctgcaaaacagcttttctaaaaccagtcaagagtaaactctcccctcatttgtcttccagacacgaagatcgattgagaagttattagaatgggaaaacaataggttataccacaaggtgagtcctgcggggagcaacttcttactgttgggtctgaattgcacagtatggaaacagatgcttttgttggactgaaaatatgaaaggtggacgaatgggcgagtcttgtgcccaggaaaatggagctcatttctcttcttttgccatcctcatgtctagctgtgcttgcactggagactgagcaaaaggaaatgtgaaacgaacaacatgatggaatatgtaagttaagggctgtttgtgagcttctctattaaatgatcatttattttctttctgatcttattctttccatgattattaatcagcaaaggtgtcaggaacttaatctccctagtgcaaggattttctacggtccacagatgcctgggtttcatgtgcaagactgatttataaagttatgaatgacttgaaaacaaggcttcactgtgttctgaaaaataataaattaattgccaagataaaatggcctgaacatgtgttgatggagtgtgaaattttagatgctgtataaagaataaccacaaccttggttacgcagcacgtcagatatggcgttttatataatgctaatgagtttccaagtatggaagagaaccttccagccaagccgctggagcctgagacgcctttacagactgactgtctgtgttcctcatggctgtagtgggttttccaaagtgttactagaacactgctttgtacagttaccttaaatgtaaacagatgttggccaacccgtcttgtcctctaaaagatggctaatttgcctacacttacatatgtgtatatacacacaattattttagaaatttaatgtattggtactctgacttatttgaataattgttcttattttgaaacagaaaacttcacaaaattatgaatttattaattctcccttgagcttagtgttttactttaaacatgtagaggctattagattaaagagaaagatttaagaaaggagttagttgttgaaactgaaactagtctttgtgaaagatgcgccgttatatttttgagaaattttctctgttctttgaaaataactgtcattgtgtgtgtgtgtgtgtgtgtctgtgtgtgtgtgtgtgtctgtgtgtgtaaaagattaatttttaaaatgtttaaatagttggacataatcataaagccattttctggttctttcattatcaaatagccaaatctttctcttcttgaacatcagagatattttatgtgttctttctgcaacctccaaactatttgttcacaaactaagtaattttgggtttacttttatgacatcacattaattttgaggttgagaaagacacatgctgcttttttataaccataaaaagggaacagctgaaagactcctgtgagcttgacctggcaggcgctatcatttcatcattgatggtcagaggtctattacctattgagagaacagcaatagccatttggggcatttcaagggtttcatgaaataataataataataattagctattaagcatttataaaccaaaacaccaaacttaaacatgaagctttagttactctttgatgtttctaaatatactttggaaaggaaaaaaaagccaatcccaaactgaatatagcacaatgatagagcatgtgcctaccacacaaggggttggatctcttgcattgggaaaaggaaaatctaaattctgtgatttccaagtggagctgtatgaaaaatattcattcatatagtatatacactgaactttcttttatctttaaaaaattctctcattacaattaaattagtagctctttaaaacattctgaactgtatacgtcatgaaaaaattttaatttaccttgaatttttatataattaagcacttttaaatgaattgtatgtcacataatcatagaaggtatacaaaaagtaattttttctttctcctttattttcccccgagacaatgtctctctgtgtagcactggctacctgggaacttgctctgtagaccaggctggcctcaaactcgcagagattctcttgcctctgcttcccaaatactgggattaaaggtgtgcaccatcatgcctggcttaaaattgattttaaagtgatttttaaaaagatattagaatatctgtatttgtggtacttaaaaataggaataaacaaagcttgaaaagctctttaaagcatttaaacattatactcacacatagtctagtaaggaaaaaaatgcctctttagtgagttaatttgaacttttctattgtgcatatacttttgcctatagctttacacaacttttttgttaaagttctcccccttgattatattttgattgttagaaataattacaaaaataccaatgaaaactattatttttgttgttgttacttgggtatgaagtacttgtggggtttgtgaacaaaatcattttcagaagactgttctttaaaaactaaggcaaactcggactcaaaaatagccacgttggactggagagtcggctcctcagtcagagcacttgttacatttacagaggacccaggtcagtcagcagcagctccgtggcactgcatagctgtctataacgtaagcccagactatctgacattcttttctaatctcttaaggcaccaggcatacacatgtgttttgtttgttttggtgtgtgtgtgtgtgtgtgtgtgtgtgtgtgtgtgtgtgtgtgtgtgtgtgtgtgtatccatgaagaaaaatgcccataaaataataaaaaataactactgttttacgtttttaaaattatactgtaaaatggtatgctcacccctgaagcctgaaatttaaaaaccctacagtagaagatgtgtttgattacctaagtactaattcagtatgaacttgcaagtcatttaagtattgaatcgttaacttttagagctacaaagaacctttccatctggtccagtctatttatgggtgaagatcatgagaaacagggaaaaggagcacaaagaagaagcagcagggtggagaaaaaggactttctggaaagatgcatttctattttatcagtgtttgggctgcaagtgtgtctatgtaccagattcatgcctggtgccgttgaaggccagaagagggcgttggatatgctgggactggagttagtgttttgagctaacatgtgggtgctgggaacctaacccaggtcctctataagagcaaccaatgctcttaactactaagctgtctttccagccctgagaaccgatgttaacatcggttttccttatactcggacaatttcaaacatgcatacagtgtatttgtccccctttcccctcagtttctctttcttcttccactcccaactcctcaggaacctttctccccagcacagcttcctcctgttcactgttacttatcatttcattgttttaaaaaataacctgctgggtttaatcaggcttgctggcctgtgcattagtaaaggattatttactggatcttgggcaacttcccagtgcctatgtgactctgagtctcccagcagctatgtatgaattgccaataactcctcagtaaggggtgagtgaggctgtgtgatcccttttccacattcgccctggagtcttgacctgtaaaatgtagtgcagggaaccacagctggtgcgggttcaagcatgcagtgagcatggtgtccagaagacaggggtcttcctctcttctcccctctccttagtgttatcggagcctttgttgtgggtagagggatagagatactctgcttctcgggcaggccagcactcagctcaggcaggtgagcgagcactcagcaggcttagtctcagtgagaaccattgtcccaggcgctaaggaatagcctcacctcaggcttcctgtagggtaactagagaaagagaagtgttttcaacctggaatggaagtgttctttcctgaggcaaatcaacccaagaggttaactgagcacatgatcagatcctcccttgtcaggacaaaggttgtgagaaaaatgagcttccaactttagaaattattgacatcaaataaaattttaacaataaaaatgtcttatctatttgtgaaagggatttgggggttggggggtgagactgtgtatccctgactgtcctggaactggttatgcagacatgcctgcctctgcctctctgcctccagaatcatacgaggttctaggctatcagataaatgtatgttttaataatgacaagatcagggtggacgctcgggcacatgtctttaatcctagcactggagaagcaaacaacttgatctacatagaggctacaggccagccagggtcacatagtaacctgtcattaaaaaagataaaattaaagttttgaaatgtgcatggattccaaaagaagcctgttttgttagcatgcatctgttatgtctgagctccatcatgacgtttctgaagtgtatggtgtgtctggtctgtgtgcattcttccctcaccctcttgtccctgctctgtcccacttgccctcccgtcttgcttttcccaggagctccttgtagtcgtaggtctttttttaggtctggtttggtttggtctggtttaagactatgactgatgtgctcgccgctcccagtgggtacggctgtgccactgatgttgtttaaagtttaaaaaaaatctgttttaagttgtttaaaacttttttcttctccttttacaggtcatcctcatagaatttttaccaaagacaccgatttttcgaccagattagcatttgctttatttatagagactttccaagtgtgttgtctttccaatggtgccttgcttggtgctctcctgctggtgacatgatgctggttctacagaattgggtggtgttcttgtttgttttgttttttaaataaccgcatgttctatgtgtgcatatttgtcaaactttgcaagttatttcatacagatgtttaatacttaagttattgtgctcttttctgttatatattctgattttcaagggttactttttgtattctcaaaaaaaatacattcgaacttagcataaaaatgggcagcctttgttattttgtcaacaaggttcacacacacagtcctttacttgttggtcccttaccctaggaaacatagtatctgttacaacatgctcatgcactgttgtgggcttccctttagaattggccacaacagttgtttggaaactgtaaattttctcacatggtcttttgggccctgagctgaccttcccaggaacctcacagttccggatcctttgtctcagtagatacagcttagcctcatgaagaactagcagccgttttgaaaatacctgtcttcaaaagtggtaatttctttagcgtagacacatcacaaatggtgtgcgtgttcctacggttactagagttcaggctcagcatagcgtggcttcaggctcctgagttccagtggacagggcagtgaggaagctgtgctccagctagtgtctacttacctacagaagtagagcattgttcttaaagttaaaggtaaaacgtgcccgatctaacataattgtagaatggatgtgtttctgaatagtttggaaagaaaaagttctagaattaaaaatcatctgatatttgataccccactggtatatagttatgtagagcaggtagttactaagaaatagaggggacatttaatactattttcagtcttcccattcactttcatctagttacatacttaattttattgaaaattggatatttaagttcagatcaggttagcttattgcttttaaatatacacatacatgtatttttttctgcttggttgtacatatctccacactatagatttctgaatgacctatgtgtagactttgggttttataagcctaaaattatacacattttaatgtgtgtcaagaacttgttccataccattgtggtctagagcaataatatgaataacgtttgaaattatataaactatgcttaataatttgtaaaaagaattgatacttccccttgtattaaaccttttaaataccaattttgttaatttatatacctatatttttaaaaagtgctgctttgtacttctctgaagtactgtgcatatacacacacccaaacacacacacactttaatagctaaatgccaggatctcatatcctatatgggactttaggaattgtctttaaaactttgacttaaggaagtccccgtctgtgcccacccccagctccttcccccaccacaggaacttaacagcttgaatccatagaaaacttttctgtgaagcactaagtgtgcaaaggattttaatggtttcacatctttatttaatgtttgtctatccagggtaggtgtgtcctaccaccataattagtatagttcaaagtaatgcggttccaaaatgcagtgtttcagtgtgaagtgattgtatattgacacagagctgaattagcctcaggcttcagaaagagcagaagtccacgatgaccacacagtctatgcaagtgttccctgtgtacagctgtcaatctgtagagtgacacagctgtgggcttgacaggaggctgacctagtgcagaggtcgtttcccctttactgttggccagttgtagtttcaaaattatattgtaagaatattttcacaattaatattaagtataggattttaaaagcttttataactgtaattaaaaatgtcttcagtgctgaaaaaaattccttagaaatgtgcactcccatacttcatacacacacagagaaactagggtgcacatgtgtgcgttaccacacaccagtcgtgatccggacatttagagtttcaggtcatagctcacagtgttaccatgtgctgggaattatatgtctaaggcaaactggttacagtgaaccttgttatatgaccaaggaaacattgggagtgttccttagctcctgttctctggctttagtaagtcatgaaccataggtagtagttagactggccaaaaataaaataaaataaaataaaataaaataaaataaaataaaataaaataaaataaaatggattgctggccagaaatcccaatgtttatttataagctaataaatgacctgtgatttttttttttttttttttggtatatcactggctttttacaggtagtcactattactgtatataaactctttttttctgacgatgtattttacaaactattttgcacacaactgtggatatttggattaaaatagttattccagagtccagtagcagtggtaaagctgatgtgacatttttagctttgaggtgactttgcccttcccttgtgaaggggttcactgtatctatccaaattaacagcagatactagaccaacactctttaataactagattgcagtcatctagaatataaaccatggaacttttgtcttaaaatccacaaaataaatttaacagaaccttgaataatggtaaacaataatttgcattaattattagactagttttctaagtgaacaattcagtgagttggaactacagctgccccccctatggtcgttatggagtatatctgattgtttctttgtacacacaggctagccacataggttttggagctcccactgcagtcacgtgtaagatgctcagtggggacataggcaggaggacttgtgtctgcgagagtccagttatactgggtttatatgtggctctgtacataatcggaccctttgactttccatggtatttgacttcacagtttaccctgtgaagtttagctgcatgcctgatattccactgtacagatttgcttttgattgacactacaccagcatccagtcgtggcccttctgtccccgtaaaacttgtggtgctgggtatgttcctaaggcctggctggtgatccgtaacgctctggtactgagctctattctcaagcactgctgccctcttggggatctagaatttccacctagacctgggaatagttgagaatagctttttattttcattcttgaaaatgttaattccattttactcttgttctgttctcagcatctttctgtgtaacccgagctagccttcacctctcagtcccctttcctagcctaccaggtactgagatcacaggtttgtgccaggctgatatttccgtgatcctgatagcactgaaaacagacttcaagatgctgatgctgtgtttgtgttgcgttctgttttgaaacaggctccatgtagtccagggtggcctgaaaccttttatgcagctgaggattataggcgttagccatgaccatgccagcaagatgcccatcttgattgcaggacatttcggatggtctacaaggtcatcaaattatttggcctctttattttcacttcctttgccagaacaggatggtgctatgactacctcatgatgttatctttgttcagctgttgcttattttttctttttattaagttttatgtgtgagtacttacctagacgtctagttcagtggtaatggtttggccatacttaacagtgacagcatactgttgttaaattgtgtttttaaaattagaggtgcggtactccccgtgtgtacttaaaatgctttgtgtgtttaaagattgggaaagtctccgctataatattgaaagaaaattatatgtgatcttttagaatgtaggcatctgagatacacagactatgttctccctttgcattttcaaacacaatgctcttcatttgagagttaactgttttttctgtttttgtaaaataatataaggtcttcttagctttgtatctcaagtattttaatgaactgaacactaagtatttagtttttggtgaattatctaacttctgctctgttactgttgtgtaaagaaacagtatcaaccaatctccaacagaagattccctcccccagggcctggtgcaggcctgggagaccagcactctggaggctatggctagttgctgtatttgaggctagacagtctcacacagcagcaagacagaacagagcaggggttgcttcttcttggttctcagtttagtaaaacgtgtccagttttttctcttgatgtaacagacttaaaagtctagaaggaaaaactagatatggtggtgagctaatgccatagctcagcaggaagaagaagggaattctctgatttggaagccggccaggtctacataatgagcattgtctaggccagctaaagctccagagtgagaacctgtcttaggttcttattacccctacaaaaaaaatctacaagacactacattgataggaccattccctccatttaagactcgatttaactaggtaataacattgctatgaatggagtcttcataaaaggaacttgccttctctcatgatatcaaaccctttaacttctgtttctttttatctgctaaagctcttagtgttgaggctccacagaagagttaaccactgtcaggtgtgatgacattgagtagtctgacttaggcaggaggataaagagttcctgcccaccctggtccacactgtgggatccatctcaaacacaaaacaacagcaaagaactctagtattataaacttactagtagtgacaatagaaataagctaggcagaactagaaggcaagagaggttactgcactggtaccctgggctagctcacaaggagtgccaggagtacacacagccttgtgctttcttttctacagactcacaacaggaattatttgaaattacactgctgcagacagagtttccctccagtgttgatgccctttgagagagtagcaggaggccactgagaacagaatacttctttttattgtttttttgtttgtttggtttttcgagacagggtttttctgtggccctggctgtcctggaactcactttgtagaccaggctggcctcgaactcagaaatccacctgcctctgcctctgcctcccaagtgctgggattaaaggcatgtgccaccacgcctggcaattattggttattttttttaatgtgataactttcagacacaccttctagtatgttgtaggggcatctttctagctgttnnnnnnnnnnnnnnnnnnnnnnnnnnnnnnnnnnnnnnnnnnnnnnnnnnnnnnnnnnnnnnnnnnnnnnnnnnnnnnnnnnnnnnnnnnnnnnnnnnnnnnnnnnnnnnnnnnnnnnnnnnnnnnnnnnnnnnnnnnnnnnnnnnnnnnnnnnnnnnnnnnnnnnnnnnnnnnnnnnnnnnnnnnnnnnnnnnnnnnnnnnnnnnnnnnnnnnnnnnnnnnnnnnnnnnnnnnnnnnnnnnnnnnnnnnnnnnnnnnnnnnnnnnnnnnnnnnnnnnnnnnnnnnnnnnnnnnnnnnnnnnnnnnnnnnnnnnnnnnnnnnnnnnnnnnnnnnnnnnnnnnnnnnnnnnnnnnnnnnnnnnnnnnnnnnnnnnnnnnnnnnnnnnnnnnnnnnnnnnnnnnnnnnnnnnnnnnnnnnnnnnnnnnnnnnnnnnnnnnnnnnnnnnnnnnnnnnnnnnnnnnnnnnnnnnnnnnnnnnnnnnnnnnnnnnnnnnnnnnnnnnnnnnnnnnnnnnnnnnnnnnnnnnnnnnnnnnnnnnnnnnnnnnnnnnnnnnnnnnnnnnnnnnnnnnnnnnnnnnnnnnnnnnnnnnnnnnnnnnnnnnnnnnnnnnnnnnnnnnnnnnnnnnnnnnnnnnnnnnnnnnnnnnnnnnnnnnnnnnnnnnnnnnnnnnnnnnnnnnnnnnnnnnnnnnnnnnnnnnnnnnnnnnnnnnnnnnnnnnnnnnnnnnnnnnnnnnnnnnnnnnnnnnnnnnnnnnnnnnnnnnnnnnnnnnnnnnnnnnnnnnnnnnnnnnnnnnnnnnnnnnnnnnnnnnnnnnnnnnnnnnnnnnnnnnnnnnnnnnnnnnnnnnnnnnnnnnnnnnnnnnnnnnnnnnnnnnnnnnnnnnnnnnnnnnnnnnnnnnnnnnnnnnnnnnnnnnnnnnnnnnnnnnnnnnnnnnnnnnnntgaatcatctctattagagggacttggggggcttttttttttctgataccttattttctgaatttctgttctttttactgtttttatccaaacaaaaatgagagcattctcagaattgtattctgcttctttttttctcaaatagagactgcagcaaaatgccatcgctgcccacagtatagttagtattttagactccattgcagaaagcctaagagagcccaacctttgtacctacagccttagatattgttaaatagccattcagttttcttcacattgtgtgtgagatgaatatttcttaagacgttttgtttgctctcccaaagaaatcaaccaaggaaaaaaaaaaaaaaaacctcaaaaaacaaaacaaacaaaaaacaccctgtaactcatgtgaagcatgcagggtgttgtaatttcagtttgcaaagcgctgagatacaatgttgctgagccaaaagcacacgatagatttaatgtagccaattgtggacttttgaaaaaaagagtaactgttccctgtgagttaattttggattttttcaaaatctctcttttaggctttgtgctggattcttccagacaaatgcgtcttccatgtgggccagtgttctgctaaatgctctccgttctccttttgcaatcaagactatgttgctaaggagatttcgcttttattggtgccattgatttgtgttaatacgttttgaatacctcttggtattcttcagtagacaaggccaaaagaaaaacttccccgagtcccccaatttacatgacaaacggagcggtggtgtaatgaagccgatctaaagtgggcagttgaaagggacccaaagaagggcactcaagtgagaaatgaagaaatgcgtgagtgcagtctgtaggctgccttcaggccagctgcaggaactggctccagccagaggcagagtgagggagcacctccctctgcaaagaccacccacttttggagcccaaactgacacaccatagattacctcactgtacaagaccacttaaaagtgagcaaggctcccaagcaggcaagagatgattctcagccccttgagtcccaagcttacagaggcctggcctcctccacgtgccctttgaccttaagttgctaatgaagtcctccatgagtgagttcttgtcctcaggaccgacatactcacatcaccttggaaaaagactctaactgatcacatttggtttactcttatattcctttgtatcccatcccagctaccaaaaccctttcattactacagcactcaggagctccgtgagcaggtgactccaggctgagcctcagtacataaaagcccaaaggactgctgtggggcacatatttacacagacttgttcaaacctgttaacatgccaacacagatcatgtcttagccatacctacgtaacttgaaggttgtttagggatgtagctcagttgatagagtgagtgcctagcaggcactcagacagtcctgagctcaatcatcagcaccacacaaatgatgcttgtaatctcagcacagggcaggtggaggcaggggggccagaagtttagggtactacacagctgtatatccagttaaggccaacctgtgattcataagaccgaagtcaaaagaatggaaacatcatgaaaaaattgctatagccattggtcatgaaatacttagtcacttcaagtattttataattgttaatttagtgaaagaaaagcataaactattggttctttaataacaagtaatctggcaagataattagaggcatcctgtggtcactgggaaatagaaattcctctcttcaccatatctttttcctacatccaagatacttgttggtcactctacctaaaatccaattttctaaattttccaaacaaaatcagacaagttttgtcaatagtcaaaaaatactagccgggccgggcagtggtggcacacacctttaatcccagcactcgggaggcagagacaggcggatttctgagttcgaggtcagcctggtctacaaagtgagttccaggacagccagggctatacagagaaaccctgtctcgaaaaaccaaaataaaaatgaaaataaaaaaatactgtagtttggggttttttttcccccttgtaatatttttacatttagtttgctttctaacatagtagttgtgataatatctgcctggtttgtatagttacagggccattctattacatagagctaagattgaggttggggaatatacctctgcattcttgctcactacatacaaggccttggattcagtcctcagcaccgcataacacaggcacattggtgtacgtgggaagtggaggcaggacgaccagaagttcactgtcacccctggctacacggggttcagagtcaaagctgaagtcaagaattctaaggatgaaatggcaactaaggattataggcgaaattttaaaaagtgaaaatatgtgtgttaaaaacatatactggcattttactttaaaattatactgggagagtatggcccgcaggagacaggcatctccagggtcacacaatgtgcatggcatgggttgttctgcacaacaaatgagacacaaaaaaccccactcatttcacaaagatgtagagtttaacagacatattccaaggtcttttgagctctgctaagccagcttttcagtcttcctgtgtgcaacatactccttgataatttttctgggtagaggctgcacccagggatcaagcctaggcttcatgcttgttttactaagcaggtgctccacccctgagctctataccccaatcctgttgggtgaaaattttctgaactaaactaagagtaagtacaaccactctgccttgattgtgttgcacctgtgtttttctgtttttgtttttctgtctgttagccctgtgccactatagcagatgccctaggaaagagttatttaggctcagggttggtaggctccattgtgtctgtgctgagaaaacacatgttggcagagagtacatggtggagcagagccacttgcttatggctggaaaaaaagaaaccagagccccacaatcctctgtaagtgctgccctcagagcactggacaatctcaactgcttcgaagtctgccacctctcgatcgtaccactctgagaacatgcccgcatgtgagcctttgtgggatgcccaggatacggagcaaggatgaggtagaccatcagaaagcacgaatgatcactctcgtcagaactatcaataattagcaccctgaaattggtccaggaaaagcttatgtggaaaagcattatccttttgcccagttctgtcagcattggctctttagccataaccctcagttttaaaaagtgagggctggagtgatggctcagcaggtaagagcactggcaaaggtcctgagttcaattcccagcaaccacatggtggctcacaaccatctgtaatgggatccagtgccctcttctggtgtgactgaagacagtgacagtaacaatgtcctcacataaactttttcttaagggccagtgagatagttcagtgggtaaaggcacctgccatcaagcctgacaccccacaggtttattcacagaatgcacagcagaaagaggaccaatcctgaaggttggctgtgccagaccagtgcagcatagcatctcctcatttgtcctcatgagacacagaacaaagtttttaatagctggtggtggtagtttatgcccagggcttgggagactgaaggaggaagaaggccacagatagccattgtcatgggcaacatggcaagccaagctgtcacctcagccaaaacaaaggaaagggggaagagaaaaacaacacccaactaggaagcgtttattcttgctactcgtgcttatacaccacctcaggagaacttaaatgacgacgaaggagagcatgtatatttttctcaggtatggtaaatttttctctcccattctgacctagttagacccagaacagtaactcaggccatcagttgttggtgattgtaccagg

SEQ ID NO: 967 - DNA, 1116 bp, Mus musculus
tgcggtagccggctgctcctgctgcgggtggctcgggctgttgctgtggttgccggagttgcggcggcgacggcggcggcgctggcgcgggcggcggcgctggcgggggtggcggccccggcggatgttgacattgtgttgttgttcctgcccacggtaatggcggcggtggcggcggcaacggcggcggccgggaccaggtctcctcagtagccggagcccacactgccgagcgccagctccgcggcctccgcgcccgccgcctcaccagccgttccccgcggccgccccagagccagggccccgggcggggggctcgccggctcgggatggcggatttcgatgaaatctacgaggaggaggaggacgaggagcgggccctggaggagcagctgctcaagtactcgcccgacccggtggtggtccgcggctccggtcacgtcaccgtatttggactgagcaacaaatttgaatcagaattcccttcttcattaactggaaaagtagctcctgaagaatttaaagccagcatcaacagagttaacagctgtctcaggaagaatcttcctgttaatgtgcggtggttgctttgtggctgcctgtgctgctgctgcacgttagggtgcagtatgtggccagttatttgcctcagtaaaagaacacgaagatcgattgagaagttattagaatgggaaaacaataggttataccacaagctgtgcttgcactggagactgagcaaaaggaaatgtgaaacgaacaacatgatggaatatgtcatcctcatagaatttttaccaaagacaccgatttttcgaccagattagcatttgctttatttatagagactttccaagtgtgttgtctttccaatggtgccttgcttggtgctctcctgctggtgacatgatgctggttctacagaattgggtggtgttcttgtttgttttgttttttaaataaccgcatgttctatgtgtgcatatttgtcaaactttgcaagttatttcatacagatgtttaatacttaagttattgtgctcttttctgttatatattctgattttcaagggttactttttgtattctcaaaaaaaatacattcgaacttagcat

SEQ ID NO: 968 - protein, 231 aa, Mus musculus
HCVVVPAHGNGGGGGGNGGGRDQVSSVAGAHTAERQLRGLRARRLTSRSPRPPQSQGPGRGARRLGMADFDEIYEEEEDEERALEEQLLKYSPDPVVVRGSGHVTVFGLSNKFESEFPSSLTGKVAPEEFKASINRVNSCLRKNLPVNVRWLLCGCLCCCCTLGCSMWPVICLSKRTRRSIEKLLEWENNRLYHKLCLHWRLSKRKCETNNMMEYVILIEFLPKTPIFRPD

SEQ ID NO: 969 - DNA, 74828 bp, Homo sapiens
  misc_feature (1)...(74828): n = A,T,C or G
aacaacttctcttttgagttcccagatgaagctgggtacttcctaatctcaattaagtgagaaggccaacatgattataactattaaatccaacttttccctgtaccatgtgcaaagaactacagaaaatcttaacactggtgtgtaagaaggccattgacttcaagtgagagttccaaaggataaagagtagattttctcagcatgcattcaggggccaaaagaaagtgcttgtgcctctcagatcttaaaagtgaaaaccagtgtcttaaaagccatgttttaagtgtctaagttaagtatggcacttaacagagacataacacaacttaattaaaaatatcccttaaattttacacacagacacagaagagaaaaaaacctatgactttttttttttgagatggaatctctcactgtcacccggactggagtgcagtggtgccatctaggctcactgcaacctccgcctcccgggttcaagcgattctcctgcctcagcctcctgagtaactgggactacaggtgtgcaccaccatgcccggctaatttttgaattttttttagtagagacagggtttcaccaagttggccaggatggtctccatctcttgaccttgtgatctgcccatctcagcctcccaaagtgctgggattacagacatgagccactgcgcccggtctaaaacctacgactttaaaaattaatagtttgatctatttttctttgtctttctactgtttcttatgatatccagggtcaggaagaaagggctaagtccctctttcttctagccttgctgtattagtcatctattgctacataaccaattgccccaaaacttggtagcttaaaacaacaataaacatttgtcatttctgacagtttctggaggttaggaattggtgaatggctgggtggtctggggttgcagtcaagatgttagttggggctgcttggctggagctggaggatccaattttagggtggctcactcccatgagtggcagaaagcctcagttcctgttcatgtgagtctctccataggtctgtttgagtgtcctcatgacatggtgagtggcttcctccagaatgagttatttaagggaataagataaaatgtgtcatgtcttttataacttagctttggaagtcatatactgtcactttcacaaatcctattggtcacacaggtcacctctattcagtgtgggagggaactatagaatggcttgcacacaagttgatgagtctctcagggaccatcctgaaggctggctatcacaatagttaagtcacaccatctagtcagagccccaaatgttaagaaggctgttgaccaaaccaaggctgatgggagtgagagactgcctctgcaaagaggcagggactagaaactcccttccaggaggaaatatggttgaagtaaatgggcatgtttagctcacaaacaaaaaagatttgggatgtgaacatctttttttttttttagacggagtctcgctctgtcacccaggctggagtgcagtggcacgatctcggctcactgcaagctcggcctcctgggttcatgccattctcctgtctcagcttcccaagtaggactataggcgcccgccaccatgcctggctgattttttgtagttttagtagacacggggtttcactgtgttagccagggtggtcttgatctcctgactttgtgatccatccgccttggcctcccaaagtgctgggattaccggcatgagccaccacgcccagacgcgcacatcttaacatatttgaaggaccatcatatagaagaagtagacttgttttgtgtgtcctcagagacaagaaccagaactaacagatgaagacgtattgaatgactcttggattccaggcaatagtcaagggcttagattacaagaataactaagtcatagttctagaccttaaagaatctagtcttttatgtggaagaacataatatttttgtatatgctcaatatactatagatatttaatacaattattgtagttgttcagctaaagaaggaagtaccgtgtgatgcagactggtacatggttttgaaggccagtgtgggccagatgacttttgggttcattctggttttatgaacctatgattctagtagtaatctccagattgtcgtgaacttaaaagatggtagtgaagagagctaagtacataaactaagtattttatatttatggtgttgatttaaaagatacttttttttttttttgagatggagtcttgctctgtcgcccaggctggagtgcagtggcgcaatctcggctcactgcaagctccccttccaggttcacgccattctcctgcctcagcctcccgaatagctgggactataggtgctcaccaccacgcgccatgacacccagataatttttgtatttttagtggagatggggtttcaccatgttggccaggatggtctagaactcctgacctcgtgattcgcccgccttggcctcccaaagtgctgggattacagacgtgagccaccgcacccagcctaaattagatactttataggtattattattatttagatttagatattactccaggagaatctaagagaaacaacatggatttcatagatttattataacaacattttagggacaaattttgaaccaaatgtgtacacatggtatgaaatgatctggaaaatatgattttatacatgtagccatccatttagtatttatttttagtagagacagggtttcaccatgctggccaggctggtctcgaactcctgacctcgtgatctgcctgcctcggcctcccaaagtgctgggattacaggcgtgagccattgtgcttgaccccatttaatatttattaagcactaattatatggcaggtactgttgtaggtgttaggaagactgatgtaaggaacccaaatatttctctagtggtgtttaagaccagtgtagcatagtggtaagattatgggatgaggaaagatcctatttgagttcaagttctggctctaccacttcctagttgtgtggccttggccaagttacctaacttccttgtacttcagttttataatgtctaaaacagggatgaaaacggtacctatgttataggaatgtttacaaggcttataaggctaagtgggttgatttgtacaaagtgcttagaatagtgcttggaatactatatgtgttatacaggttgtgtatccctaatctaaaaatccaaaatccaaaatgcttcaaaacctgaaactttttaagtgctgacatgacactcaaaggaaaagctcattggaacatttcaagctttggattttcagattaaggatgcttaatctatatacacatttagctttttctccaagcataattggttctgctctcaggaagctcccagcctagtttagatcatcttccttccctctcctttagtggccacagttgtatggaaggcgaagaggatctctgttgctctctaaaggccttttgcatagttgtattgcacatacatcaatcctaaagcattggagcagaagtgctattttctattacttatactgcgggcaccaaaaactctaaggttggggcacaacctgaacattttaggtcagatgcccactcttggaactggagatatggtcagcttaacctaatcacatgtactgaggatggaggggatatgatttactaaaaatcctgagagtgttgttacagaatgtgtgccatttacagaataacaggctgggaagtggtgcaggcaggctaggctggactactggtctcccacttggggatttaaaaatacacatctggccaggcctggtggctcactcctgtaacctcagcactttgggaggccgagttgggcagatcacctgaggtcaggagttcaagaccagcctggccaacacggtgaaaccccgtctctactaaaaatacaaaaatcagccaggcgtgctggtgcatgcctgtaatcccaactactcaggaggctgaggcaggagaatcgcttgaatccgggaggtggaggttgtagtgagccgagattgtgccattgcactccagcctgggcgacaagagtaaactccgtctcaaaataaataaataaataaatacataaataaataaataaataaataaataataaaaatgcacatctgataatgtcactgcctggcttcacatcctccgctcctttacttttggcatgcatttaagatttcttacaaaggccatcaagtttccaccagcctctttgacctcaactccaatctggctctgccttcctcactatgatccacccacactggctttgttttgtacctcatttgagctgtgctcttttctacttcaaggtctttaaacatgctattcccactgtctggagctttctcctctcttctctctacttccctacctccatacctttgcttagctcatcagcttacatgtcattttcccagagaataaatcctgatttcttggagtgagttaggtgggtttactactcccatggacccctgtgcttctccacagaactgatcacaattctaatagttatttatttttataattatctgtcagtcctccccagtggacttcatgctcacaaaggcagtggctgtgtttggtttactgctaaatccctagttcctggcacagtatgtgacacatgagaagcattcaatgcaaatttgttgaatgaatgaatgagtgaacaaatgagggtttatatgctttctcaagtcagcttgggctgtgtgatatcaggaaatacatatttggtttttgaccctgtttcctggcatacaacacctaaaatgcttagaaactccaaagcaatgtctttctgtattctagtgagttgactgtaggctggcagctcctagttagcttcaggatgagagctgatcaccagaaggggctgaagattaagtcaatggccagcggtgtaatcaatcatgcctacgtaatgaagccccataaaaccctgaaggaacagggttctgagagctgccagacagctgaacacgtggaggattacagggagatgaacaagaactcatccgtgtgctgggaaagcagagcaccccgactccgcggggacagaagctcctgcacccaagacccttccagacctcaccctctgtgtctcttcatctggctgtttatttgtaacccttaaaagatccttcttggctgggtgtggtggctcatgcctataatctcagtactttttggagaccaaggtgggtagattacttgagcccaggagttggagactagcctgggcaacatggtgaaaccccatctctacaaaaaatataaaaattagctggatgtggtggtgcatgcctgcattcccagctactcgggaagctgaagtgggagcattgcttgagcccagggaggttgaggctgcagtgaatggtgattgtacctctgtctcaataaataaataataaataaataactattggactgcagtgaatggtgattgtacctctgtctcaataaataagtgaaatgaaatgaaatgaaatatccttcttaataaactggtaaacctgtttccccgagttctgtgagccgctctaacaaattagttgaacttgacgagggtgttgtgggaaccccaatttatagctggtcagtcagaagttctggagacctggacttgtgactggtgtttgaagtggagggtgcagtcttgcggactgagccctcaacctgtgggatttgatgctatctccaggtagagagtgctggaattgaattaggacatacagctggtgcccactgcagaactgattgcttgcttgttggtggagaaaaccccccaacacatctggtcacagagagtcttctgtgttggttgttgttgttaagcaggagaataggaaaaagcacattgagtgtattttccacacaaataggctgccacacaaaataccatagactgtgtcttagtccctttgggctgctataatcaaatatcataaactatgtgacttataaacaaacatttatttctcatagctttggaaacttggaagttcaagatcaaacggctggtagctttggtttctggtgaggggcttcgtccttgtatatggttgtcttcttgctgtgttctaagatagtggaaggggcaaaccagctctctggggcctcttttatgagggcactaatcccattcatgagggctcagccttcataacctaatcacctcccaaaggccctaatatttcctaataccatcaccttgagggctaggatatcaacatacaaatttggggggatgtaaacattcagtacatcgtagcctgggtggcttaaacaacagaaatttagctcacagttcctgatgatttggttcctggtgagagttctcttcctggcttgcagatgactgtcttcttgctgtgtccccatggcacagagagatcgaaaactatctagtatttcttcttgtaagggcacaaattccatcatgagggccccagcctcttgacctcatctcaacctaattacctccaaaggctccatttccaaataccattacattgagggttagggcttcaacatatgaatttggggggggggacaaaattcagtccatagtacatgcacgatctcatttgatcttccagaaccccatgacatagtttccatttgaagatgaagaaaaggaagcttagaaaggtgaagctgccaatggccactctgctaggtagaaatggaactgggaagttttcaagtctaaggaattaactaagcaatatttgccttaaaaacaagtcttgctgactcctgaggcctgacattatccagtttggttttgagccatttggtctaaaggtaaatatgaaaatatgtgaggcaagaatataaagagaaactccaatgaagaggaggctatggagggatgggcacttagcagggtgcaagtgagtacctggacacagagggagaggatcctggaaaagtggcttatctccaggaagaaattgggggaggagttttacaggaaactggatcttggaaggttggcagggcggaggtggagggttggaattacgatgtcaactctcatcaggaaaatgtttgactcatgttcgctcacccctttggccttcttcctaggtcccacacccttttgctggctctgacaggtttttcagaacaggaaaaagaagaaaacacacacacacacacacacacacagacacacacacacggaaaggaaaaaagaaaaaagaaaagggcattcccctgcctctaccgtatacccaggccgtgggagttacaaagatctctcttgtgaatagatcttagaataagaacatttctcccacatccagccagtgtgaagataagagtgaggttctcacagtcctctgaagcctaattaagtcacagtgttctggaaagagcactagtaacactgtatctcaattcagataacatttattaagctccttttctgaagcaggaactgtggaaggtgctggagttctaaggagctctgtgtggcttcctccgtctttgggaagttgtcagctatgtgatgatttagatactttggggcactagccccttatcttggccactgtttctacataagggtgaattctcagccacagccaggtgtgggctgtgccaggacatactgaccttatttcctcttattctctttcttatcttcccatttgcagctgttcctttaactgagtgcagccactagtctcctggttcctgccaaggaggaaattcagaggctgaggagggaggatcgcttgagctgaggagttcaaggctgcagtgagctatgatggtgccactgcacaccagcctaggtgagagagtgagactctgtcttaaaaaaaaaaaaaaaaaagacattcaggaaagcttggaccaccagtatactcaattagaccattaaatcttaaatcgtcacatggccttgagaaagccacatagcatctctgaaatatagcatatcatagcatctctgaaacatagcatatctgaaaataaatacaccctctttgcttacctcacaggttcttgggggaatattaaatgatatattatgtacgtgctttataagcagtaaaatattacataatgctgtggtaaccctcacagggttgataagctagggagccttaagcatcacctattaccccgtatttattgtgtactgggccttcttctaggcacttcaccgatcttaagcccttgaatctgctgagcatcccaatggggcaggtactgaacagggaagttaagtggcttgtctagggtcacacagtaagtggcagagctgacattcaaggccaggtagtcaggttccagaacacacattgttaaacaccagaccaagctgcctcctgtgtgccccactgacacttcctgtgtcctcctccatgagcccctggcagagatgacaattgcttgccttaacaatagataagctaccagaagtcagggcctgtgcctcattcacacacgtccacagtgcctgccacatagctagagttcagtagatatttgttgaatgaacaaataccctccagggagggatacaataagtctgatacaactactgtatttttccttcattttttcttggctaaccacactcatttccttcagttgtttccaaaaggaggttggcatctctcactgtcctcattgacctcctttgcactttctccacgtcaacagtgacccatctaaagccgactactgtgacatgaacactgcacttgaagagcctgaccagcgctgggctcagtagaactatcctttcttctcccatggtgtatcctcactgtccaggactctcttctcagaagcccactccttcccctgtactgtttatatgcttaatgaaaccaagtacccaaagtgaccgttcaactgttactaggcagctaagtagactccattaaaccttttccttccttcctccccttctttctttctctcccattcttctttcattcttctcgtccttccttctatcctttcttccttcctgcctccttttcttcctctcctctgccctttctttcaggtcttttttgtggtaggaactggtaagaaaaggaaaggaattccctaagattttaaggaaacaacaacaaaaaccaggttatgtttggtgagagagttggggcaagaaactgcatcttctaatatggaatccaggtaatttatcagttttttttcatagcatgactacggtgagatttcttgtaagaaaaaaaaaaaaataccagcatcgctggcctcatatattggattatacttaaggggatcaagggataagatgtttgaatttggagatgtcttgaaaaatcctgtggtgagcacaaatgtttgcagtgtctctgctggactcctcaaattgggaaaaaagagactctggttctcatcatagactcaaaacctgaggaaaagcgagatgcgattattagataaactggcaatgacacgcacaaaaatgtgtctattccagccagggcttttcttttcagttgtttgttttggttagagatgactttggggaactgcatgtcccactggacattccaagctgcgttgtcggagtcgcgggtcgcggcctccagtcagcggagccgccgcccccagggtccgccacccagaagtcggcggaggggggcccgccggcgggagcgcgcgccccggtcgccgtctgcgggtagaagcagaggaaagacggtggcctgggagcgcgcgaggccgcacgtgcgcgcgcccgcccgcccgccagccagtccgctcgcccacgcgcccacgcacgcgcccgcccgcccgttggcccgggaagtctcgcgatgccgtagccggctgctcccgctgcgggtggctcgggctgttgctgtggtttcctgagttgctgctgctgcggcggcggcagcggcgtctgtgcttgtggaggtgtcggcctctgggcggatgttgacattgtgttgttgttattgctgatggtaatggcggcggcggtggcggcgacggtccagaccccatcccctctgtagccggagccgagacagccgacagcgaactccgcggcctcggagccggcggcagcggcgactcccctcagcctccgccgcctcgcccgccggtaccccggcgccaaccccgggagtcaggccctttgggcaggggagctcggaggctcaggatggcggatttcgacgaaatctatgaggaagaggaggacgaggagcgggccctggaggagcagctgctcaagtactcgccggacccggtggtcgtccgcggctccggtcacgtcaccgtgtaaggcccggaggagggcgagggcgggaggtgcgggctggggtgggccccgttactccacgggagccccgtttcccctgtgtccgtctggtgtcgggggccttccgaaagagtaggcaaccaggaagtgagaacttggcttattttcatttgtttgggtctccgaagtggggacggacgctgtccttcctcctccacacacccctttagcaggccctacaggcccgggcgatgtgacgatcccagtaggcacgggttttcattagggtctgccctgcgggccacccttcctcttcagggtggaagtacgtgtattgacagggagcctccttgttttctcgcccagttaccctgtggttgtctgtgcctttgcacccagtgacatggctcagaggccagatctgggccgtgtgagaccccagtgacaattggcagcgaagctccgtttcgtgtctatttcacacatacccacaggtctcccagtttttccactaatttccgcagaactaatgcaagttcttgtaattgtacgtgataaaaatatatagttgaacacaaatttaagatatacagaaagaaatatgtttacaacaacaacaacaacaactacgtgagggacatacactctgctcaggttactgagggaaaattgtagtcctgaagctcctccttggggcacgaacttggggcttgttaatttggaaagtcccactagtaacattaaaagtctgatattaataaggaatgaaagctttcggaaagaccatgacaaaggaatgtgaagccttgaaccaaataatgagctgtccggaagcaggaagttttgtaatgtttcactatgaagtccacagttttgtaccacttgatgtattacattgatactctctcattttagatctcttgttcaaataatagatcagacttccatacttgtcaggtatctctgtacttcttcaccttttcagtgaaacaaaagagccagcaagtctgagaatgtctggaatagtcttcattatattttggtgaagagtgagtgggatgtgctgtgaataacttagggaaacagtaagacttctcatataagtttgtcagcaaaataattgcatttctcgtatgaccagccatattgttgtttgagtatgcttatgtaatgctttaatttctttagtacctgttagtttatgttcaggtgacttaacagggtaaaaacactgcataattgccatcacagcaccatgacaagacagtggaatttaattcaccacaataatactttctaagtgttgtcaccagcttaagaagtataaccaaatatcatggatattaaacttttaacatatatcacagaattcataacctgccatttgattttattttgacttttaggacctttttgcactgttttaagcctaaggagtatgtggatgcttaaagaagtgatttccaaactttgtcatgccatctatccctccttctacattcctcatgtcaaagaaaagctagagaattttgtcatttaaaaaggcgacgctgtagttgtaatgtttcctctgttaaggagaagaaaagctaagcactttgttgggcaagtggaaaatgcaatagtgggcaaagtgctcagaacctaggtaatcagtaaacttgattgtagttggctacgtggagaggttaatagggtagaaaataattattagtggttttcaaacttagctgtccattagaatcctgggtgtctttaaaaaaagaccattgtctttgctccaccccaggccagttgaaggccaaatactaagtgagggtcctaggagtggacagttaaaataataaataaataaataaataaataaataaaatctcacaggtgattctaatgtgtagccaagattgaaaactattccaggttatagggagggactatctatcatcaataaacagtatgcctttctacattgtgagttaaatctctgattttcctcagcaacttccttcttctcccatttatcttggttctaggctctgggttaaaatctatctcagctacttcctggataaattgtttattcatgacctttagttgagatggggatagttatagtcgataccttttaagattattaaggattaaatgagatagtacatgaaaagaatttattgcactgtgtggtactatgttcaatagatactagtttttattattctcctcctcagatatagttttccactttgagaaacaggtgtaaaacaaagtactaaaaaattagaactgccattatcaaacataacaatgattcaccttagtcttatttttccatttctaagcaatgtgtatgtgcttaaattactgtgtttgaagtattttgatgacaataaggatctttctgcattgaaaacttaacctgttttgtggcgacataggtaataatagaaaacttttttttttaacatggctctgtcatgcataattcccaggcacactagcacaccatgccagtgggtagcccagttaacatctataaaggtttttagaattggtgcatatgtattactataactgttgagcacattcaatttttcttgctttaaatataaatgggaagagctattagaacagttgtagtaagactggctaaatttaacaccccctcctccaccttttttttttattaggtgctgatcagagcagtcttcccttaccaatttgaaagtaattgaccatgtaaactgaatcatctgtagtctagatcagtctagaaggatatagatcaatccatatgtttttcacagatgtaacttttgagtagccctttacaattgactatttctgctctttttttctactttaatatattacagtattactgtttattttagaaactggtattctcacgtgacgtgattggcatgtcattgtggtgatgtgagaaagaaagttaccttccattctctaggttagtctctaggcataatcagatttttgtgacataggatgcaacatgtttaatttgcctaaagtctgctttaaagtggcttttaatgcaaatattttcctttttttaaatacaaatgttttcatcgtgacccccaaatcagacttactttttatacttctctcatgatcagtattcttttctgacattcttctgtttaagtataatatttcccttcattgttagatttctaggtagcaatatggggaaatcttgtgcagaagcatattttgaggaaagtggtattggaaggaaggaaaataaatgataaattcctgttattgcatagtatttaggtacatgtaacctaaaaggcttacagtcaccattcaattaaaagtagatttcctttttgctttcatggtgacttctcatataattgacgatgaggaaaaatagtttctaaaataaacagtaatactgtaaaaagactattaggtagtcttgaccagattggttaatattttaaaattatggagttccttatgcttcaaaatatatttgcaaaatatgttgatcatttattgaagagtttcgtttttcacagtggtaactctaaaggatgtgtcagtctaaaagttagaatttaaaagtagttttaggccaatatttcctaggtaatctgtcattataacagacattatttgctcccatctccactttctacccttcttgtatcagaatcaaagttggggctttcctagagtatgtataatctttgacttctaactcaagccctatcatagagccaagttattttgctgaggtttgtttctaatgttattctcttgtaattttaccgtgtcttcatgtactctcttctgaggtgtaatcttaccatctccacaaataattccttatccttcaacaccagtttttatcaatggctgtcagaaaccactttttgcttgttttcattccagatatgttatggaagattaaagatttagaaatgtgacttgaaaatgtttgggaactacactgggatggaatatgacttttgaataagagacatcacaagaacaccttagtgtttattgatctttcaaatggtagagttagtaaaaaattgtcttgaaatgtgtcagtatttcaggactgctgctagatgctgtggttagcagtaagagacctgaatgtgagttgccaaattacagaatcatgtcaataaaacaattttgttaaactttataattcctacttctttctcccacccagcataatatttaagacacattctatttatttctaaagattaagctttctgttttgaaatttttgaaggcttcattgatgtatctccacaggctataagttcttgagggcagaggttgtgtctattgatctttctttactatttaatatagtgtccagaatattatagttcctataatattttctaaatgaatgaagtaattgtatacatctttggattttgtcagaattgccaaatgaatcactgttttcttctctgcacctccgaacaaaggcaaacaatgttctataatagaatacttatcacactgaaaagataaatagctcctctgttttaaaaaatgaaatctggtaattgtgaggaaattatcaaattaaggtagattttttttttataacttttttttttttctccagagatttttgttttctttttttagagacagaatctttccctgtcacctaagctggtgggcaggggcctgatcacagcctactgtggccttgacctcctggctctagtgatcctcctttctcagtctctgaagtagctagaactacaggtacacgctgctatgcctagctaattttttaaaaaaattagttttttggtttttgtagagatggggcttcactgtattgccaggctggttttgaactcctggcttcaagtgttcctcctgcctcagcccccacaaatgctgggattgtatgtataaaccaccatgcgtggcttcccagagatttttcttattccatatagtttgagaggaaattaatttgattataatttggtaatttgatataatacatatctttggtaatgtgaagaaaaaattctatgcattttatttggaccaactactaaaacttcttaatgcacagattttcttgaagaaatgagaaatatgataattaactgaggtttcaaagtttttactgtatttgaatttgagaatttatatgacatttggtccaaagagttcagtgttggatttttgcctaccaagggatatgaaattgattagtacttaaaattttatatgactagctaagtggaaaagagggattaaatggtgaaaagtaaattatatgtaattattatgatactaatcaaatactattctaaataatttaaataaataatattactctaaagcagaattccagctggagtttatactgtcaacaggttaaaggcccaggatattaggccagctgtatactcagaaagaaatctttcaaatctctaatagctgtgtctggcttaggtttctaatctgctataaagctatttagattttattaataaaattaagctttaaatataacatgtagcaacagatgctcttaagtatccttcaggtatcttctgtgtaagattgtgtgtgtgtgtgtgtgtgtgtgtgtgtgtgtgtgtgtatgtgtgtatgtgtgtatgtgacttttgacccaatcagaatattgggtctggaagggaagagtctagggatttttatttttggtaggagtgttatgtgattctatcagacatatttggaaagtaatagatggtactgtggaaaaagtgtggtctttgatatgaggcagattggtttcaattctcagtcacttcctgacagtaaccataagcagattaacctttccgaacttcagttttttcatctgcgaaagagataatatccaccttagaggttacgtgtgagagtcagaatttatctaattaataggcattcaataaattattacttatgacatattttgatgtttaaccctgcatgcacatttttttggttattctttaccattttgtgggaagtcagtctaaaatgtgaagtatgcttttctgctttaaaacaagattctgagcatagctcagaattatctaattgactagaggaatcatttaatcaaaagcggctatcagattgatacacagtgatgccttagtggccctgaggtatgttggagtttgagaaccttctctaaatggcactttcatttaaatttcatatgtgggctgttctttttggtttgctttcttctgtctttgtaattggtcagctgttcttggaagcaaaacaaccaaccagccttattagaactgcatataaagtaagagaagttcatcctgattgttgaatgtagatgcttgggttttgatgcttgggttttacaatatttattttgttttctcagagtattttttgcttaatctttgattatcagctgtcttgttgaggtttcctgataagtaatttaatgagtatttgttaaatgcccatttttctgccaggtattgcacaaagctctgggtatataatgaaacccaaaatgaaacacacatagtttctgccctcatggagtttacagctaatagacaaattttatctgataaagttgcactgaaggaaatggatgagatcctgtgattgaaaataatgtgattaggaagaacctctctgaggaagctaacatttaggaaggatgagagtcctgtcaggagcccctggatctggagaacagcaggtgccaagactccaagccaaaacaagcttgacttgcctgaggaactgaaaggatacctctatattatggctagaatatagtgaacaaaggggataatgtcttgaaatgaggttggagggttcagtaggggccagaaaggattgtaaaggaattagaatgaaatttagaaggttatagaagcagcttccataagacatgatagtggccccagctagggtgttgatctctagattaaaggagttattacagttctgtgtgtaaaccatcaaatttcacagcttttcctatgaggtatggaaatacatagcagtggccacttttgctgtctaattcctcagttcttatgtttgttttggtctgtttattttttaattttagctttgtgtaggctgaggttaaataactggctacccttactgttcactgggagtgattttgatggcatacctgcactttctgttctgctgctggggcagctagtatgccaagagaatagcacatgccagaagtagagagtgtttcccacaagatcatagattttgaagtgggaaccctcgtaaatgtgatatcctttagctgtaaggtgtgtagtatgtgacagccctcagtacatgattcattagatttgaggaaaaaaattgtgttttttatatcttacatttaaaactcagttgcatccgtaggagctgaaatgttctcacagtgtccctgaagaataatttttttgttcttaagctttttttctctcccactatctacttaggatagagttggttggacttgaaggtaacctaactttgttattttgattgataaaaaaagtgaatgtactatatatagtgagcttcctgcaagaacttcttgttttattctctttgatcttgcattgtagtcataatgtgggccttggttagttcagtggtggagttcctatgtacccagtctcctttcttggtcttttctaaactgctcaattataaatgttacttgaaatgagtatttttgttagtctatattgtaaatcaattcaaccatatattttgcttaaatgaacataatttagcatcattattttgctcttaagatttatagaagtatgaagaatattctaaaatatgtataaatcagatatacaaaaatcttttttctgtagttcagaaaatttaaaagttgttaagttagatcagctgcatccctatatcgccagaagttagttatactgtgcattttcatcagtatacacttatatagctttcactgcttaacaacatatttaatctgttaataatggaaattataaccttaataattaaaaattgataaaatgctaatgctagattattataagactatgtataatggtgaggtttatgatagagtaaatttaacacatgctttggagaattaagtctttgatttcactagtttcctgaatgagattaaactttcataaaaccagatgaactcaaatattgttcagaatgtggttacagagttaagatttttagaattattctgaaacccaaatatacgtctccaactccagggtctctgtatcttttgtataaatagagtatactttcaattagatcccatcctccttgagctacattgatattcagacgtatgttgaatcaaccagataaacttaaagcatgatttatatgcatcaaagcctgttaatttttttccatagttatgactttatctccaaaactagctaaaaatttgagttcattgagctcaaagttcaacattaggaaataagcactctcttcatgtgccatctgcataaccaatatgttcagtttgaaatttctagttcatatgctcataggtcttgtcatatctgtaggaacataaaaattctctgtatctatagatttgtacaggtggaatgtctcagaatccagaatatccaaaatggaattcataatctacaccccaaatcagcttcaacggcagccttccattctcagttgatggcagatcgaggaccctgtttgtttagatcaaaaactttttgatgtattcttgattttcctctttctctttcactacatccattctgtcttgacatcttggctctgtcttcaaaatttggccctattttgccacctacacgactggagtgaattgccagtctcccttctgccttacgcttaatgtatttcttaagtcagttatggtggcatgtacctataatcccagctacacgggaggctgaggcagaaagatcacttgagcccaggagtttgagactacactgggcaacatagcaagaatccatctaaattacaaaaaatatatatatatttttttcttccccctgtctccacctttccacctttgcctctcctcttatacaaccattttggtacatctgctatagtgatccttttaaaacataagtcagttcaagtcttttctctgtatcaggcccctcaaaggttccccatctccttcagagtccttttaatgttctaccagaccctccctgatctggcccatcattacttgtctggtgatctcagtttctgcttactattggcttcagtttattttgatttctaattatcgatggctttactacatcttgacttcaatttaagccctctctctgtcagctctgcatgttaccatctatttgtcttatgttcagatacctcaagagagagctgattgagttagttaatgttatctaagttaggcaggactgtttggccttgccattccatgtgctgctacccagcccagggattagctgttcttaaagcagatgcccacttgtgatctaattagccaaagtatagggagttcctagttaggcatgcggagtaacagactactctctctagtatacatggttttgagctgtgtagcatcttttcagattgttgtattataattaatttaattataagatatttctgttttaaaaatttcactgttaaaaatatcactgtaactcagaagaaaagaaacattgaacatatatttttgattaagggcaaaacaagttgaagcagtggattcttgcatttctgcatttaaaaagcaaaattcgttatgagttcaaaacatgtcttaatttaaaatgatagctcagtagtgaatgccaagagacattgttaatatgaggagatacaaggaacatagaagaagttaaaactgaagtaagaaggacagaggattagatggacttgaactatggaaaacattgaaatgcattcaagaaaactattgattagtgaacctaaatttccttgtttacttatcttaaaatacctagttaataccaaataaaatattcaaataagaaaacaaaattagggtggtattgtacattataaaatatttgtctgccgggtgtagtggctcacgcctgtaatcccaatactttgggaggccaaggtgggcggatcacttgtcaggtgtttgtgaccagcctggccaacatggtgaaaccccgtctctactaaaaatacaaaaattagcccagcatggtggcgagcacctgtaatcccaggtacttgggaagctgaggcacgagaatcgnnnnnnnnnnnnnnnnnnnntatcactgcagatactttttattcattaacatatctgtgccatgttgcattttctcttgatacatttctggaagtagaattactgggtcaaagggtaggaattttttttttttttttttttttttgagactgagtctcactgttgtcagcccgggctggagtgcagtgacgcaatcttggctcactgcaacctccgcctccgggttccagcaattctcctacctcagcctcctgagtagctgagattacaggtgcccaccaccacatccagctatttttgcatttttagtagtgatggggtttcaccatgttggccaggttggtctcgaactcctgacctcaggtgatccacctgccttggcctcccaaagtgctgggatcacaggtgtgagccaccacacccagccagggtaggaatattttttaagacccgttttacatactaccagatggcactcctgaaaattctatcaacttgcaagatttttgttcttttcagttaatatcatggtatattgaattttcttcttcaacattttcctccattgagaaagatggtaaaaatactgaagatacataaataaatctaaaaatgaaagggagggaaggtaaataagtttatgttcaatggtatttctgtgtttttagtttgcaaatttcatttttaatggttgtttaatattctgttatattgagataagataattttcttaaccattcctaaaatgttgtaaatagatacatatttatatttgtgaataaagattcaatgaacttgtttatgcataaatttaatccacatttcaagttattttttaggtaatattacatttctaaagagaaaacagtatgacaaaggtataaatattttcaatgccaaataattttaatggttgtaacaatttatagttccattgacagtgtgtgatatttttccatcttgaccttcttgccaacataaaatattttttaaaatttaattagtcttgtagataactgaattaagatgccacctactttaaatcatatttttaaaaattatccaagtgttacttctggctttttggattagtagaatgtttggttattagagtctgaagggggttcagcttcctactcaatgcaggaatcattgctcttctttcaagtacatcaaattattattttatgggatgaaacttggcctttctaatactgtgctgagccagttgtactttgtcttagaataaaggaaattatttttaccatatataaaaagttttatgtaaacttgtaggtacatttataatgctgtcaattgaaaacaaaacatagatgccattttcattctaacagtctctgcctcctgctgaacttaaaaaagaagccagaactaaggtattgtcaaaattaagtggtttatgtcaaaaataaatcattagaggtgatattttacagttatattatcaaacaagaagtgtgacttttcctatccatttaataaaataagaccgtcttgctaaaattctacctgctactattgttttggttggtctagatttggattaaaaaaaaagaaggttttggcagggatgaaaaacatagcaaaggagatatttgctgtggcctgtgccaaataagaaattctgacattcaagctctttgccaggagaaagcatgctatatgaaagaagacttgctgaaaagagttgttttcaactactctgatgagaacagtcttattagtaaagaagtgtgtaggaaagcctggattgtggtagtttgaataatgaatgggaggtaacgtaaagatagttaatgtaaaggagtctttcaaaacattagttgaggaaggaaagaaatagatgccatcagacattgagagagaagaagaaataaggattcacatcctcaggtggatagactaattcagatttgtaggctatgtttaaggagcctgaagcgaggtagaaatacagtgaattgcagaggagactggaggagatgcactcagaagtaaatggttagtttttggaagctttcctccattgagagatggtaaaaatactgaagatatataagtaaatccaaaaataaaagggagggaaggtaaagcagtttatattccatgacatttttttctctcagagttgacaactgtggttatttgcaaaaaaatgttggttgtgaggataaagtggagtacctaaagacaggcacaacaactacggagcatggaaaagagaacttactggggatgaataaagattgttacaataatactcatgagattagaaataagatatgtatgttatatatatatttattattggtgatacatttataaatgtgatttttctccagtagctccaggcagtgtgaagaaggtaaacaatttaattgaacctgggttggcaagggacactgtagagatgattaaaggtgtttgttggagtatgttcaaaatgattgactatgtagttctggcaaataaggaaggaaatggagtcatagggagctatggaggggtgggaagcaatatattacaaccagaggccaaaaaacaaatttagtaaggatgggagaaatgaaatgattgatggcagtggtaagagaagaattttacagttcagaatttcagaggtgatacagtcccaagtgatgacaatatgcagaatatatcacagtgagtaggttgctgaattagatggaggtgcaggaggtaaagttctttagaatagataaggtcaggagtgaactgtagttgaggatttctaaggaaagagtggcatttcaacagggtttttggttaaagtgaagatatatacaagtatgtggtgcttaactatggggactactctgataaatgggtcagtaggcaatttcatcattgtgcagacatcacagagtgtgtgtatacaaacttaaaatggtgtagcctactacacatctaggctatatggtatagcccatagcccttaggctacaaacctgtacagtatgttactgtactgtgtattgtaggcagttataacacagtggtaagtttttgtgtatctaaacatagaaaaggtacagtaaaaatacagtattaaaatcttgtgggaccaccttctagtatgtcctgactgaaacgttgttatgtggcacatgactgtatgtatttaaggtttgttttgttttttaagataagatataaggaggtatcctgatagctgcagatcaacagattgagggtttcaaggtctatcaggaaagataaacttgaatatgatgatcatgagaaagcaggataacagattggagtggtttgcagagttatgactatagactggaggaatgtagagatagtgaaatggatgtatgtgggatatgagtaaaacaagcctgtttcaagattccatttagatttaggtgtaaagttggagtccccccttcaaaactttacagtgtattacatgaactttcaaaattatctcaaattatataaaagtaaaattggtctcgtgtgtgatttcttaaggaaacaaaggaagctgtaaaagccataaaagcctgcactgaagtgttgcatggaatgtgctcagtagttgtgatttgaatgaattctctgttctccaagtactggtagacttctgatagataaaagcaagataggttgtttttattatgtcttttatcttcttgttatatttaccattctttgaaaatagtttaaatcttttatcaattctaaagccatggaatattttaaccatgattcaagaaaaggtcttttaggtaataggaatagatataggtatagtacacgtctacattttctttcataccatctaatgcactgacaaataggtgttcaatggaacctaagacggttcttggtagcactttgtccattcctacttttttattttttctctccctttttccttattcttcccctcctcactctttttcctgcatttttccttctcatcttattgcttgtgtaggacacctgctaaaattcacaggtattgtttgtttccaccaataacattaaaagctggaaaaaatcgctatcccacccattaaaataatatgctttgtagttactttttaagatataaagttggtagctcaaattaaatgaaccatttatatttttgtttacatactgctggttaattaacattcagccccttatcattatgcaaaagtttccatttaactgctaaaataattgttacatttcataaattgcttgttacagttattttatctcaaacttccattttatgtctaaaacttcctccatatgtgaaaatgctttctattgacttgacctttaaattaaatggtctacatttttggcaacaataacatgtaataacatattcttcttattttttaaaatagatttggactgagcaacaaatttgaatctgaattcccttcttcattaactggaaaagtgagtgtctcatttatgtactatttgtatgcctcaaaatgaaagtttttttctgagaaaattagaaaaaagtatgctcatcagtcatgttttttgacattaatattgcattgttattatttcttaaaatttttctttaggtagctcctgaagaatttaaagccagcatcaacagagttaacagttgtcttaagaagaaccttcctgttaatgtacgttggctactttgtggctgcctttgttgctgctgcacattaggttgcagtatgtggccagttatttgcctcagtaaaagagtaagttgaattatatattttaatttaaatttagaagtggacaagcaagtcttgcatttatctagtttttattttttgtattgaatgaatcacactatcctgaataaaatatgaaaataatctgatccaggagaggagtgagtcagtaaagttactatatatccaagtgctgttattaaatagccatctaaaaattatatttataattttagaagcaaggagtagtgtatggcattgtctgtatctgtacattgacggtggtgtggtatagtgatcaaggatgctggcttcagctctaccacttttctctgtgaccttaggcacgtttcctaacctctttaaaccctacttgacacaactgtaaaatgttcacctactacttgaatataaaggtaaaatgaaaatgtttggaaaactcttagctgaatatctcaaaggaagtggttaataagtattaattaatagtattcttactgactgtaagatggtacccatacaagaaataaaatggttacaatggttgtttcttgttggtaagattatgggacattcttttctgctttttatattttacaagtttcctgtagtgagcacaaagtgattctgtaatcagaaaaaataatttcaaagactcattattttgactgcttataataaaaaattctggccaggcacagtggctcatgcctgcaattttaacactttgggaggccaaggcgggcggatcacttgaggtcagaagttcaagaccagtctggcgtacatggtaaaaccctgtctctactaaaaatacaaaaaattagccaggcgtggtggcgggtgcctgtaatcccagttagtcaggaggctgaggcaggagaatcgcttgaacctggagggcgaaggttgcagtgagctgagatcgtgccattgcactccagcctgggcaacaatagtgaaactctgtctcaacaaacaaataaacaaaattttaagatgttggtagagatatgacaaattattatagattgaatgtattatattcttgttaaaatttttaaaaattgtatttatatgtataaaaatgatactttaaaaaaatttttttaaataaataaattttattttttaaaaatgtatttaaaaaaatagagacagggtttcttttttttaattattatacgttaagttctagggtacatgtgcacaacgtgcaggttagttacatatgtatacatgtgccatgttggtgtgctgcacccattaactcgtcatttaacattaggtatatctcctaatgctatccctcccccctccccccaccccacaacagtccccggtgtgtggtgttccccttcctgtgtccatgtgttctcattgttcaattcccacctatgagtgagaatatgcggtgtttggttttttgtccttgcgatagtttgctgagaatgatggtttccagcttcatccatgtccttacaaaggacatgaactcatccttttttatggctgcatagtattccatggtgtatatgtgccacattttcttaatccagtctaccattgttggacatttgggttggttccaagtctttgctattgtgaatagtgctgcaataaccatacgtgtgcatgtgtctttatagcagcatgatttataatcctttgggtatatacccagtaatgggattgctgggtcaaatggtatttcaagttctagatccctgaggaatcgccacactgacttccacaatggttgaactggtttatagtcccaccaacagtgtaaaagtgttcctatttctccacatcctctccagcacctgttgtttcctgactttttaatgatcgccattctaactggtgtgagatggtatctctttgtggttttgatttgcatttctctgatggccagtgatgatgagcattttttcatgtgttttttggctgcataaatgtcttcttttgagaagtgtctgttcatatcctttgcccactttttgatggggttgtttgctttttcttgtaaatgtgtttgagttcattgtagattctggatattagccctttgtcagatgagcaggttgcaaaaattttctcccattctgtaggttgcctgttcactctgatggtagtttcttttgctgtgcagaagctctttagtttaattagatcccatttgtcagttttgacttttgttgccattgcttttggtgttttagacatgaagtccttgcccatgcctatgtcctgaatggtaatgcctaggttttcttctagggtttttatggttttaggtctaacatgtaagtctttaatccatcttgaatcaatttttgtataaggtgtaaggaagggatccagtttcagctttgtacatatggctagccagttttcccagcaccctttattaaatagggaatcctttccccatttcttgtttttgtcaggtttgtcaaagatcagatagttgtagatatgtggcattttttctgagggctctgttctgttccattggtctatatctgttttggtaccagtaccatgctgttttggttactgtatccttgtagtatagtttgaagtcaggtagcgtgatgcctccagctttgttcttttggcttaggattgacttggcgatgcgggctcttttttggttccatatgagctttaaagtagttttttccaattctgtgaagaaagtcattggtagcttgatggggatggcattgaatctataaattaccgtgggcagtgtgtccattttcacaatattgattcttgctatccatgagcatggaatgttcttccatttgtttgtatccttttttatttccttgagcagtggtttgtagttctccttgaagaggtccttcacatcccttgtaagttggattcctaggtattttattctctttgaagcaattgtgaatgggagttcactcatgatttggctctctgtttgtctgttattggtgtataagaatgcttgtgatttttgcaccttgattttgtatcctgagactttgctgaagttgcttatcagcttaaggagattttgggctgagacgatggggttttctagatatacaatcatgtcatctgcaaacagggacaatttgacttcctcttttcctaattgaatgccctttatttccttctcctgcctgattgccctggccagaacttccaacactatgttgaatatgagtggtgagagagggcatccctgtcttgtgccagttttcaaagggaatgcttccagtttttgcccattcagtatgatattggctgtgggtttgtcatagatagctcttattattttgagatatgtcccatcaatacctaatttattgagagtttttagcatgaagggttgttgaattttgtcaaaggccttttctgcatctattgagataatcatgtggtttttgtctttggttctgtttatatgctggattacgtttattgattttcgtatgttgaaccagccttgcatcccagggatgaagcccacttgatcatggtggataagctttttgatgtgttgctggatttggtttgccagtattttattgagaatttttgcatcactgttcatcaaggatattggtctaaaattctctttttttgttgtgtctctgcccggctttggtatcaggatgatgctggcctcataaaatgagttagggaggattccttgtttttctattgattggaataatttcagaaggaatggtaccagttcctccttgtacctctggtagaattcagctgtgaatccatctggtcctggactttttttgattggtaagctactaattattgcctcaatttcagagcctgttattggtctattcagacattcaacttcttcctggtttagtcttgggagagtgtatgtgtcgaggaatttatccatttcttctggattttgtagtttatttgcgtagaggtgtttacagtattctctgatggtagtttgtatttctgtgggatcggtggtgatatcccctttatcattttttattgcatctatttgattcttctctcttttcttctttattagtcttgctagcggtctatcaattttgttgatcttttcaaaaaaccagctcctggattcattgatttttttgaagggttttttgtgtctctatttccttcagttctgctctgatcttagttatttcttgccttctgctagcttttgaatgtgtttgctcttgcttctctagttcttttaattgtgatgttagggtgtcaattttagatctttcctgctttctcttgtgggtatttagtgctataaatttccctctacacactgctttgaatgtgtcccagagattctggtatgttgtgtctttgttctcattggtttcaaaggacatctttatttctgccttcatttcattatgtacccagtagtcattcaggagcaggttgttcagtttccatgtagttgagcagttttgagtgagtttcttaatcctgagttctagtttgattgcactgtggtctgagagactgttataatttctgttcttttacatttgctgaggagtgctttactgccaactatgtggtcagttttggaataggtgtggtgtggtgccgaaaggaatgtatattctgttgatttggggtggagagttctgtagatgtctattaggtctgcttggtgcagagctgagttcaattcctggatatccttgttaactttctgtcttgttgatctgtctaatgttgacagtggggtgttaaagtctcccattattgtgtgggagtgtaagtctctttgtaggtcactaaggacttgctttatgagtctgggtgctcctgtattgggtgcatgtatatttaggatagttagttcttcttgttgaattgatccctttaccattatgtaatggccttctttgtctcttttgatctttgttggtttaaagtctgttttatccgagactaggattgcaacccctgcctttttttgttttccatttgcttagtagatcttcctccatccctttattttgagcctatatgtgtctctgcacgtgagatgtgtttcctgaatacagcacactgatgggtcttgactcttcatccagtttgccagtctgtgccttttaattggagcatttagcccatttacatttaaggttattattgttatgtgtgaatttgatcctgtcattatgatgttagctggttattttgctcgttagttgatgcagtttcttcctagctttgatggtctttacaatttggcatgtttttgcagtggctggtaccagttgttcctttccatgtttagtgcttccttcgggagctcttttagggcaggcctggtgctgacagaatctctcagcatttgcttgtctgtaaagtattttatttctccttcacttatgaagcttagtttggctggatatgaaattgtgggttgaaaattcttttctttaagaatgttgaatattggcccccactctcttctggcttgtagagtttctgccaagtgatcaagtgtttctttttttttttttttttttgaaatggagtctcactctgttgcccaggctggagtgcagtggcatgatctctgctcactgcaagctccacctcccgtgttcacgccattctcctgtgtcagcctcctgagtagctgggactgcaggtgcccaccaccacacctggctaagtttttgtatttttagtagagacaggttttcactgtgttaggcaggatggtctcaatctcctgacctcgtgatccatccgcctcggcctcccaaagtgctgggattacaggcgtgagccaccgcgcctggccgagacagggtttctatgcccagggtggtctcaaacttctggactcaagcagtctgccctccttggcctctctaagtgctgggattacaggtgtgagccactgcacccagccaaaaatgaaattttgttaagttgaaaatgaatgaacagttttatgtggctacattttgacaaccaataagagtaggaagtatggatgatcaaattctctttgtcccttgatttctgttataaaataaaagatatattcctactaaaaatttttaaactggtacattctattgataggaaggagttaatgcctttgtaatagaatgacttatgatatttacttcaatatttctaatattccttttttctaaaaatggttctttttttttcatcattctcaccagattacctttgcactacagaacattttttcgtctctggatccacagttgattttgtcgctcttgtagtttggatcccctcactcccttctgctatgtgggcatttccattgtttcaatgcctgctatgtctctcttggttgggaattgccatcatgtaacccagaaaatcctaagagttttaatactgtagatacctttgagatctggcttgtttgtttgtgttggttttgttttgataccctttttttaaacctttaaatgagtaataagatgttgcagtgtgtacggtgtatttagaaaacaaaggtaaatgagttaaactttgcattcatatcaacttgagatcctttttgaaatgccttcattaaattccttcttatgtgagatgtaagattgactttttaagctagtttaatctgtagtttctgaaagtacatttcatttagcattgtagtgttcagtcttaagttctctctttgtattttatatgactagatggaatatttatttgatgcatttaattttatatggagtactatctagggagcataaacaaacatgacttgctttttaaaaaagccatacatatctgtccttgggtgtaaactattacataaccatggtaagagtgacacttcatgcatgtgtgaaggatattaccggccctggagaaagaggtgctttgtaagatggaggcaaaataatttggatttttttttccttttttttttttttaaattatactttaagttctgggatacatgtgcagaatgtgcaggtttgttacataggtatacacgtgccatggtggtttgctgcacacatcagcccatcatctacattaggcatttctcctaatgctatccctcccctagcccccaacccctgacaggtcccagtgtgtgatgttcccctctagagcagggatttttaacgttttatttgccataaatccttttgatggtttagggaagcctatgaatgctttcttagatgctttacatatatttaaaaatatttaatgtattctaaatgcataaggtaaaaatacatggattacagaggaaaccaattatataaaatatagttatcaaaatactagaaaactttaatgtggtttataaatatgtttattaatgcatacaaaatgagatagcaacaaatccatgataataatgatatgataggaagaatctgtgatttctttaagtgatgaaggtgcaggtcctgttcagtctattgcagttagttgcatacattcataacctaaggaaatgtaatacatttcagttagtggttaaaaagatgtattttcatttcactcactttcacagattcccagaattctgtctaggtactgtatgttaagaaccctcgatcgagaggcatgagtataaaaaattgccagcctgtgaacttctgttttctttcttgtgatgtgaaatcctcttatgtggttagaatggtctcagactctaagacaaatcaggaccaaaggcatacttgatatgcagctcagtgcttttactttcttcacattattcactgatttggaaaactgcagttctgtcttgccttcaaaatccatcacaacacgaggtcaggagatcgagaccatcctggccaacatggtgaaaccccatctctactaaaaatataaaaattagctggcatggtggcacgtgccagtaatcccagctactcgggaggctgaggcagaagaatcgcttgaacccaggaggtggaggttgccattgattgtgccattgcactccagcatggggtgcaagagcgaaactctgtttcaaaaaaaaaataaataatgtgtctgtaaacagaaacacacacaaaacaaggttacgtattgatccattgatgaaaatgttgtgaccagaggcttgaagaacctaaccctgtatttccccagaagtaatagttccctactttctaattcagcattcgcagagactctacagaacctaactacctgaataacaagaacagactgtgctcggtctccaccgagcgacttgctcannnnnnnnnnnnnnnnnnnnttccgtctcaaaaaaaaaaaaaaatctatccccaacttagtgccctctttttatgacctgatattattcccaagaccttgtttttattctgttctattattattattcttattatgattgagacggtgttttactcttgtcatccaggctggagtgcaatggcatgatctctactcacagcaacctcctcctcccagtttcaagcaattctcctgcctcagcctcctgagtagctgggattacaggcacctgcagccacacccagctaatttttttttttttttttttttttgagacagagtttcacttttatcacccaggctggagtgcagtggtgtggtctctcagctcatcacaacctacacctccccggttcaagtgattctcttgcctcagcctccggagtagctggaattacaggctcctgacactatgcccagctaatttttgtatttttagtagagacggggtttcaccatgtttgccaggctggtcttgaactcctgacctcaggtgatctgcccgcttcggcctcccaaagtgctgagattcaggtgtgagccaccgtgctcggctaatttttatatttttggtagagacggggtttcaccattttggccaggctgatcttgagctcctgacctctggtgatctgcctgcctcggcctcccaaagtgctgggattacaggcgtgagccactgcgcccagcatgttctgttattttgattattttttagaccttccaaattgccttttttcttaactacctttgcctatttttgaaaattgttttttaatatacagtaaaatttttataaacagttctgtgatttttgataaacgcatagagttttgtaaccaccaccagaatcaagatacataacagttttccataaaaaacttacttgtgctgtagtaagttttttacttactacctctgtagttgaaccctcgtcaactcttaaaccctggcaaccagtgatctgttgtctatccctacaatactgtcttttctagaatattatataaatggagtaaaatagtgtatataactttttgagtctggcttctttcatgtagcttagtgcatttgagattcatctattttcttttatgtattaatagtttattcttttttattgttgagtagtattccattgtatggatgtatcacagtttgtttatccatttatcagttgaagacactgagtttccagtttttgaataaagcttgccataaacattcacatgcatgtttttgtgtgaacacaagttttcatttttaggaaggggattgccgggttatatggtaagtgaatgtttaatttataaaaaatctccaaactgttttccaaagtgggtgaaccattttgcattccagccagcaatgcatgagagatccagttgcttagcatccttgcaggacttgatatggttagttatagaaattatagtcattctaaaagatacatagtagcatctcattgtggttttaatttgcattaccctcatgagtaatgatattgagcaccttttcatgtgcttatttgccatttgtacctctttgttaaagtgttcattgaaatattttgcctatttaaaaattgttatttcttgttgagttttgagagttcttcatataattctgaaaataagtcccctggcagattcgtgctaatatatatttgcagtctgtagctgtcttttcattctccaacaatgtcttcggcggaacaaaagcttttgcttttgatgaattcatcgctttaaaaaaaaatagattgtacttttgtgctgtatctaagaatttgcctaaaccaaggtcatgaaaattttctcctgtgatctctttacttttaggtgtgtgacccattttgactcaggtttttatatgagtgtgaggtatgggtgaaattttttttttttgcatatcactttctaggttttccagtaccatttgttgagaagactatcctttttcccttgaattgccattgtacattgtcaaaaatcagtcaacaatacctgtgtaggtctctttccatactctattctgttctattgatttgtatgtctatcttgattaaatatcataatgtctagtttactgtagcttttttttcttttttaattaaaaaggagacagggtcttgctgtgttgcccaggttggtctcgaactcctgggctcaagcgattctctcatctcggcctcccaaagtgctggaattacagatgtgagccactgtgtccagcctactgtagctttatagtaagttttgaaatcaggtatattgagcctttcaatttttttcttatttttcaagattgttttggctgttctaatttctttacctttctttataaattttagaattagcttgtcaaatatctataagaaacactggtatttgattggaattacattcaatttacagatgaattggagagaattgacatcttaacaatattaagtcctctaaaccaagaacatgacatagtctccatgtatttaggtctttgacgttttttttgttagagctttgtagttttttgcgtagcatatagattatgctcatgttttattagctttatacataagtatttctttgggtttggcgctattgtaaatggtattgttttttaaattttgatttccagttgttcactgctagtacataaaatacagttgatttttgcatattaacgtcatgtccttcaaccttgccaaattcacttattaaattccaggaacttttttgtagattccttgggattttctacagagataactatgttgtcagaaaataatgacagttttattcccaatctgtgtactttttcttttccttctctttttcacagtgtaggagttctaataaaatgctgaataggagtgatgagagcaaactccttgctttattcttgattttctgtgttgtttttctgttttcacttccattgattttttgtttttattatttcttctccttgctttggatataatttactcttgttttttagtttcttaaggtagaagtcattgatttgtcttttctttttttcttgtataagcatttaatgctctttccctctaaagcactgttttgactatatcctacacatttttatatagtatttttgttttcttttggttcaaagtatttgtgattttctctctgagtcatggattatcaagaagtttgtttaacctccaaatatttggagatttaccagaaactcttctgttactgatttctagtttaattttattactgttaaagcatatacttggtgtgatatcagttcttttaaatgtgttttattttacagccttgaatacagtgtattttggtaatggcatgttcaaaacttttatttatattttactagctttattgaagtgtcagtgacatacaataaactacacatacttaaagtatattatttgatgagttttgatacacttgtgtgcatcaagatagtgaacatactcatcatttccagaaacttccctgtgcaagtgctgatctgctttctggcactatagattaatttgctttttctagagttttatctaaatgaaatcatacaatgtgcattcttttttgtcttcttgttttattttttatttatttatttttgagatagggtctcattctgtcactgaggctggagttcagtggcatgatcatggctcactacagccttcccagacttcccaggctccactcatcctcctacctcggcctcccaagtagcttgggccacaggtgcgcatcaccacgcctggctaatttttgtatttttggtagagacagggtttcatctctcaaactcctgagctcaagcagtccacccgcctcagcctcccaaagtgctgggattacaggtgtgagcctccgtgcttggccagcccctttttcttttacttactatgattttgagattcaacaatgttgttgcatcagtagttcattcccttttattgctgaataatgtttattatatggatatgccacatttgtttatctatttacctgctgatggacattttggtctgtataaataaagctgctgtgaatattcttgttcaggtctttttggggacatacactttttttttttttgagtaaaaattcctgagtggaatgccttggtcatatgtcatgtgtatgtttagcttcctttcctttcttttttttttgtggttgtgggacaatccatggaaatgcatttaaggaactgagaaactgccaaaagtggaggtactattattttatgatctcatggtactgtaggatagattctgttctgctacatacttgtcaacatttagtatagtcttttaaagagttggggtatgtgtcccctctaaatctcatgttgaaatgtaatccccagtgttggaggtagggcctcgtggaaggtgattggatcatgggggcagataacttcacaggttggtgctgagttctctcaagatccggttttttaaaagtgtgtggcacctcccccaaccccgttgctcctgctctgccatatgagatgcctgctgcctttcatcttccaccattattataagctccctgagtcctccccagaagctgagcagatgccagtgccatgcttcttgtacagcttgtccaataaaacctcttcattataaattatctagtctcaggaatttctttatagcaatgcaagaacagcctaacgagattttagtaccactgtcttgataactgatagaactagtagacagaaaatccctacagatgtcagccaacttaacctaattgacatttataaaacactctaaccaacaataggcaaatacacattcttttcaagtacatacagatcactgagatagttcttattcaaagtaattaaacaagtcttaataaatttaaagggattcaaaacatacaaagtgggttatctgaccacaataaaattaaattaaaaatcagtaaatgaaaaatcgctagaaaattcccaaatatttgaaagctaaataaaatgcttctaaataactcattggtcaaagaaatcaaaagggaaatttaaaagcagaatgaattaaatgaagattaaaacacaaaatgtcaaaatttgtgtcatactactaaagcagtgttcaaggaaggaaatttataccactgaaagtctacactagaaagcctcaaatccatgacctttgttttcatcttaagaaattagaaaaacaagagcaaattaaatccaaagtaaggagggggaaaaaaataatggtcagactgaaacctatgaaatataaagcataaaatcaatagaaataatcaaacctttgagaagatcaataaaattaataaatctctaaccagagtggggaaaagagaaagaaagagataaattaagtttcaggaatgaaacaggtgatgagactaagaggttttaaagatagtaaaagaatgattaatgaatactataaactgtatgcctgtaattcaacaccttaaagtggacaaattccttgaaaaacaaaaactgtaaagcttaaccaagataaaatagatgacttgaaaagtcccatatcaattaagtaaattgaatttgtaatttaaaaacttccaacaaagaaaattccaggcccagatgcctttactggtgtattcttacaaaatttaaggaagaagtaatgcctgttctacacaaactcttctagaaaatcaagagaaaagaacccttcccagctcactttatgaggccatcgttaccctgaggccaaaaccagacagagatattctaaaagaaaagtctacagaaaaatgttcctcatgaacatagatataaaacttctaaacagacgtttagcctatcaagtccaacaaaaacatgaaaagaaagacacacatggccaagtacattgtccttcccaggaaggtaagtaaggttggtttaacatccaaaaatgcaatgaatgtaactcaacatatttctaaactaaaaagaaaaaccacacaacaatctctaaagtggcagaaaaagcatttgacaaaatccagcatgtatacttgattaacactctcacagcctaatagaataaaacttcctcaagctgataaaggacatctacaaaaaccctacaattaacatgacacttaataatgaaggtctgaatgcatttcttctaagatcaagaacaagccaagagtatgttctcactactactaatcaatgttattctggagattctagccagggcagtaaggcaagaaaaagcaacaagtatagtaataatactgtcttgatgggcagatgacatgtttgtctatgaagaaaattcaatagaatctttaaagaaactcttgaaactaacaggtgagtttagcaaagctataccctatcaacaaaaaataaaaaattaaaatgaaaaacaatttttaagtagcataaaaatgctaggtacttacagagaaagctgaaaaaaacatatataagacacactaaaatctacaaaataccactcagaaaaaaacttaaaagacttaagtaagtgggggaaaatattggttcatgtgtcagaagaggaaatactttttttttttgagacagagttttgctcttgttgcccaggctgaactggattggtgtgatctcagctcaccacaacctctgcctcccaggttcaagcaattctcctgccttagcctcccgagtagctggaattacaggtatgcaccaccatgcctggctaattttgcatttttagtagagatagggtttcttgatattggtcaggctggtctcgaacccccgacctgaggtgatctgtccacctcagcctcccaaagtgttgggattacaggcatgagccaccgcgtctggcgaggaaatacttttaagtggccaatttctccaaactgatccatagatttagtgcaatccaaactaaattcccagcaggactttttttttttagaaattgacagactgattctaaaattcatatggaatacagacaacctacaaaagcaaaacaactctgaaaagggaatacaaagttggagaaccaacgctacccaatttcaagacataattataaagctacaatactcaaagtagtgtggtactcgcatcaagatagacaaacagataaacagaagagacagagccaaaaaatagacccctttatgaactgatttccaccaaaggtggaaaggcaattcagtaaagaaagaacagtcttttaaagagatgtaattggtaaaattaaatgcctatatatatttttaaaatccttcaatctgtacattaaaccgtatattaatagaaagtttaactcaaaatgtaaaacctaaacctataaaactctagaagaaaacataggagaaaaatccttgtgacctgggcttaggaagaattactaggtataacattagcagcacaatccctaaaagaacaccagacaaattggactccataaaagttaaaaatttccgtttttgaaaactattggaggatttaaagacaaactactgactgggagaaatctttgcaaagcagatacttttgtccagaatatataaagaattctcaaaactcaacaataagaaaacaattcaagaaacattgagcaaaaatttagaacagacacctcaccaaaaaagatatgtaaatgaaaaattagcattttttcagatgctcaacatcactaaccattaggaaaaatgcagattaaaaccataatgataacattacatacttattagaaggactgaaattaaaaagactatgttagtctgttcttgcattgctataaggaaatacctgagactggataatttataatgaagaggtttaattggctcatggttctacaggctgtacaagaagcatggcactggcatctgctcagcttctggggaggactcagcttataatcatggtggacgatgaaaaggagcaggcatctcatatggcagagcaggagcaagggggttgggagaggtgccacacacttttaaaaaaccggatcttgagagaactcagcaccaacctgtgaagttatctgcccccatgatccaatcaccttccacgaggccccacctccaacactggggattacatttcaacatgagatttagaggggacacataccccagctctttaaaagactatactaaatgttgacaagtatgtagcagaacagaatctatcctacagtagtgtgagatcataaaataatagtacttccacttttggcagtttctcagttccttaaatgcatttctatggattgactataattttgggtttgtgtatttattcatgcagcttatgctgtatgtattttggcactctgtaattaggtatataaattttcaggatttttgtgattgacctctttatcattataaaattgacctgtatttttctctgaaatttactttgaacaagactccgtctgcaatcccggcacctcgggaggccgaggctggcggatcactcgcggttaggagctggagaccggcccggccaacacagcgaaaccccgtctccaccaaaaaaatacgaaaaccagtcaggcgtggcggcgcgcacctgcaatcgcaggcactcggcaggctgaggcaggagaatcaggcagggaggttgcagtgagccgagatggcagcagtacagtccagcttcggctcggcatcagagggagaccgtagagggagagggagggggagggggagggggaggagaggatacaccaacttcttaaccttgttagttgtcttatctcctttataaaaatgctttactcttttagatatgctaaccagaattatgccactttctaaaagtggtccctatatggatttattaaaaatattgcatattttcatttcctttgtgcttttatttatatttaaaattgtatcaggaaatcattcatttaggaatagggaagtggcctgtaacatgtggtggctagaacttgcattttggtgctagaactagctggattggactgtgacacttatcaaaccactcactctaaacccttctttgtagtgttgttttaagaattagagcaagtgggccgggcactgtggctcactcctgtaatcccagcactttgagaggccgaggcaagtggattgcttgagaccaggcgttcaagaccagcctggccaacatggtgaaaccccgtctctactaaaaatacaaaaattagctgggcgtggtgacacgtgcctgtaatcccagctactcagaaggctgagacagcagaatcgcttgaacccaggaggtggaggttgcagtgagccgagatggcaccactgtactccagcctaaggctacatagtgagactctgtctcccaaaaaaaaaaaaaaaaaaaaaaagcaagtacatctaggctacttaatatagtattttgcccatagtaggtgcttagttcaatgtagttactgttattatcattttagtattattattctcagtgtttgtcttcttaactactgtatcctcagtgctgtcacagtgcctagcatctacttggtgttcaataaatatttgttgaataaatgtattcatctggcctttaaaatcctggcattagtaagatcataatgttgcataagatatggtgcttactaataagaagaagattccctgataaatagaagcatcttgccttttagaataagtaataggagctcctactgctgtaggagcagtgtgatacagtataaaggatagtaaaccaatgtttgaagctgggtgaccttgagagagttgcttaaaacctctctcagcgttaggtttttttttttttcctttccttttaatctgagcaaaggacaggccagctgatttttcacatattttccagttccaaaaatgtgtaatcgtctgaaaattgagctttgtaggtctataaactatttctatttccatgctttaaaaagaatccaggagtggtggcatgcacctgtaatcccagctacacaagaggctgaggcaggagaattgctttaacctgggaggcggaggcaaaggttgcagtgagccaagattgcgccactgcactccagcctagacgacagtgagactccgtctcaaaaaaaaaaaaaaattctcaatgttaatttttattttaaagcctaagaattagcattttaggccaggtgcggtggctcattcctgtaatcccagcactttgggaggctgaggcaggagaatcacttgaacctggtaggcagaggttacagtgagccgagatcgtgccattgcactccagcctgggcaacaagagcaaaacctcatctcaaaaaaaaaaaaaaaaaattagcatttttgtaaatataaacatatatatatgtgtgtatatatatttatatattttataaatatagatttatacatttatatattgtatatgtgtgtgtgtgnnnnnnnnnnnnnnnnnnnnnnnnnnnnnnnnnnnnnnnnnnnnnnnnnnnnnnnnnnnnnnnnnnnnnnnnnnnnnnnnnnnnnnnnnnnnnnnnnnnnnnnnnnnnnnnnnnnnnnnnnnnnnnnnnnnnnnnnnnnnnnnnnnnnnnnnnnnnnnnnnnnnnnnnnnnnnnnnnnnnnnnnnnnnnnnnnnnnnnnnnnnnnnnnnnnnnnnnnnnnnnnnnnnnnnnnnnnnnnnnnnnnctcggcctcccaagtgctgggattacaggcatgagccaccgcacctggccatcattgtaataaatattttaatataggtttcttaggttttttcttttctgaatttttttaaagataattgctatttagtttttgaaacctttgctaagatgcctgtatttctctcatgtaaagtattttgtatgcatacaaataaatggtaatccagttcactgtatttttttttagttgagattctagtttacttatgtttcttctgaatatctttgctctcaagttcaagtttagttatccaataattgtgacttactctggttaggggtatagtagtgttgagaatctaaatgggagaagtgaatagtaaagttttgtttttaagttagaatgcaactttgtaagacttaaagaaattcaaaggaaagtgaacctgggggaatcataagcagaaagctaagaatattggtatatgggaggaatataaaatatccttattcagttataccgatgtattaaaaattatccaaaactttcagaactgatttactctgtgtttgggattgaccatttatagtcagtaactctgagtcataaaatgagaaagaaacatttagatgaagaatcagataaagaaaaatacctctaacaacataatacagatattgcaacaaggcagaacaaatttgaaattatattgaaattctagtgaagtgagaatccaaagtaatttctagtgaacaaggaatgatgaatgaaatgtagtcttataactgctgttgttattgattgaagatgtggaaaatcaatgctatttttttagaatgctattcaatttgccttattttggtaaatataacaaatattcatgtggtcaataatggtcttaatcttcattaccctatatttcttgtctttcatatgattttattccagaggtttttcaggaacctgatctttcttgtgcagaggatgtttatactgttctaatgtacagtgatagacttagcaatataaaatagaacatagagaaatttctgtccagtaaatttagagaaacaaacttgagttatggtttgtatttaaatcagaaacatctttcttttacacttaataaaacctttcacatcatatttgatatttgacttttgtttttttttttttttctttgagatggagtctcgctctgtcagcaggctggagtgcggtggcgcgatgttggctcactgcaatctccacctccccagttcgagtgattgtcctgcctcagcctccagagtagctggggctataggtgcacaccaccacgcctggctaattttttgtattttagtagagacggggtttcaccatgttggccaggatggtcttaatcttctgacctcatgatctgcccacctcggccccccaaagtgctgggattacaggcgtgagccgctgcgcccagtcgatgtttgacttttgcacctacttaaatgtaatttaagatagaaacacttagtttataataccagttattccaaatggctaaattcctgatgtttaacttgaaagattttgctataaaatggaaaatatgtgttgatatgcaatgaaataatagactacaaggaacaaatgaagagaaagataattattgtataccggctattagcaaggcacattacatacattctcttttaatttaatcttcataacaccctatgtggaaaatatcatggtaacatcagaaagttgagtccttactcactctttaccagtgatggagttaatcaatttacatgtactgtattcttacaaaattacaaatcagatattcagattattttaaggatgagaaaactgaggctcagaagtcaagtaacctatttgagatctcccagtttataaagttaagccaaactagaattccaatcttacagctcaaaatttcatgcttttcctgctattttaaagagctacaaaaatcaagctattttttattattaaaatttgactttatacctaccagcagagagagaggttttagagctttggaaggaatttaaaagatttcatgagttaggaaattcaggcctatgggttataatttacctaatttgtccagttgattgataaatggtaacaatatccaagcattattatattaacttttgcagtactttagttgtttagcagatttttctttgtaagtattttttcttaatatttaaataagtttgtatttcttgaagacacaaacagtaaaggaaagaaactgtaaagcaggtaaagtgggtataggagaaaaatatacattttaagcagattttatacaaagttatagttggacaaccaagagttgatatattgcctttgcttctgttttgcttttataaaaacaaatgaaaatcaacatcctgtctttgaaaagttatttattaggttcctactccctagcaaataagtttacatgacttctggtaaagttatttttcttctagtattagatcctttcttgaaacttgtgtatttacttttagagagattgagaatgacatgtaatgagtgcatgtcccatgcagtaaagatgggacaggaactctgaatgaaagaactgggttttctttatctagccctaggcatttaatttgtggtttcttgccccttcttcactatcttccccattataagatacagaataatgaaataggtttgacctttttgaaatcttatttcagtccctttacaaaaggggtcctgcataaaagatttctcataactagatgaatacatttactgcagttccattttaaagaatgctttggccttgaaacttaaacagattcttatgtaaattactgccattattatgaacactagtgacaatttgtttttaattaaaattaaaccgcattactaagttttcatcataaaagaggatactcataaaaatgtaaactttgagccttaaaaatgcagaggtagcactgtaaagatatgctagaatgcttagaaaatgtgttttgtcaacagctggctgacattcatttctctgtaaatatttagaacatagtattggtgtggtggtttatagaaggatttgcacctatcttctgtgacctgagtttttaatatgagatactgtatttttcaattctagggtgtccatttgctgttttttaaaatagattccagttttcttttgaaattcttcgttttttcatccagctttctactttcttttcttgaacacattaatcatagttttagagtaagttgattattcaaggccgatagccttgttagtggctaagaaaacttgcatgtcatacatatgttatttgtctcaggataatatctgtaaaaaagttcgatttacaaaaatttttcattataaaatcatgaatggccttgaaattaacaacaaatgtatgtaaaatataattgaaatgaaaccattaagattttaaagtgaaaggaagaagggtggatttagtgaagtgactgcattagtcaagaagagaaaggcataaaagtagacaagaaagagaagtaaacagattaaaatgaaacttaaaagacaaaaactgtcagagtttggcatactaggaaataaaaaaggtgaagggcagaggaggaggtgtataaagatttattatctctgttttccagctttgtttagtagatggatactagggccattcctttattcatctcagaataatatctgtaaaatatccataacatatctgtaaaaaagaaaagttcttgacaaaaattctttttttttgagacagagtctcattctgtcacccaggctggagtgcagtggcacactcttggctcactgcaacctccacctcccgggttcaagcagttttcctacctcagtctcccaagtagctggggctacaggtgcacaccaccatgcctggctaatttttgtatttttagtagagttggggtttcaccatgttggccaggctggtctcaaattcctgacctcaagtgatccatccacctccacctcccagtgttgtgattacaggtgtgagccaaacaaaaaaaaacaaaaaaattgtttttttgtgatagtattataatagttctatagcatgatgaaaagaacaggaaattgaaggccatttaatcctggtttcagatccgagctccatcatttcctagtatagatttacatttcttcacctctgtaagctttagttttcatatgtaaaaagaaagtagtccaagccgccatataggcttgttgtgcagattaagtaaggtaataaaagcaagacacaacatgggatcagacccaaagtgaggatccacaaatgctggttccttatctcttcttgtttctccagttgtgttatcatccatcagcaggtgattttcttttacccctttcttcttgttttttaaaacaattcctattttttttttttttttttgagacagggtcttactctgttgcccagggtggagtgcagtgacacgttcactgcagccttgacctcccaggctcgagtgatcctcccacctcagcttcccaagtagctgggaccacatgtgtgcagcaccatcacacctggctgatttttgtaatttttgtagacatgggttttcaccatgttgctcaggctggtctcgaacttctaggctcaagtgatccgcccttctcggtatcccaaagtgctgggatcacaggcgtgagctattgcgcccggcctttaccccttttctacctgttggtcctaagtgtctcatgcatccgtgcgaagagaccaccaaacaggctttgtgtgagcgacaaggctgtttatttcacctgggtgcaggcgggctgagtctgaaaagagagtcagcaaagggtggtgagattatcattagttcttacagattttgggataggcagtggagttaggagcaatgttttgtgggcgggggtggatctcacaaagtacattctcaagggtggggagaattacaaagaaccttcttaagggtgggggagattacaaagtacattgatcagttaaggtggggcagaaacatcacagtggtggaatgtcatcagttaaggctattttcacttcttttgtggatcttcagttgcttcaggccatcctggatgtatatgtgcaggtcacaggggatatgatgtcttagcttgggctcagaggcctgacattcctgtcttcttatattaataagaaaaataccataaaatagtgttgaagtgttggggcagcaaaaattttgggggggcgggtggtatggagacataatggacgatgtttctcagggctgctttgaacgggattaggggcggcgtgggaacctagagtgggagaggttaagttgaaggaagattttgtggtaaggggtgatattgtggggttgttagaagaaacatttgtcatatagaatgattggtgatggcctggatacagttttgtatgaattgagaaactaaacagaagttagaaggtctgaataaaagaaggagaaaaacaggtattaaaggactgagagttgggaggacccaggacatccaattagagagtgcctaagggggttcagcataattacttgcttggttggcgaatttttgggctctatccttgagttttattatgttgtcatataccaggccagattgatttacagaaaaacaacactctttatttaaaaatatacggagtcccctttttttagcagtgagtaagtcagggcctcggtgattttggagaaaaaagaaatgcaaagccagcaattgtttgttaaagaaggattagaaatggctaggagagagtgagtgcgattgatagtgtgatagagatagctggggagaggtagtgggtggcataagaacgggaacaagaataagaatgagtataaaagtaaagaataagacttcatcagggtgaaagtattggagtgtgttctgtcagcaaagatcatctatccactccaagagggaggcaagagtggtggattggggatagattttcacgatggaaaggaaatgagaggttttaagagatgggctagcggcttgtaacctacatggaagaggttatgaaatgacgacagaatagaatgggcctgtgaggctggaaggagatattttccttggtccaagaaccatttgccttgtgtaggaagacattgataggtggaagttttagtggcagagtaggtgggagtgactgacgagaaggagaaaaactggccatgaggggcagaagttggaacgctagctgcttgtttagctaccttatcagcataagcgttgccctgaacgatgagatctgacaccttttgatggcccttgcttgcagtgaatgactccagcttcctttggaagtaaagcggccttgagaagagtttttattaaagaggaattaatgatggaggacccttgcacagtgaggaaacctctttcagcccatataacagcacggtggtgcaggatatggaaggcatatttcgagtcagtatagatattgatgcgtagtccttttgcaagagtgagggctcaggttaaggcatgagttcgccttgctgagaggtagtggagaggggcagagcggtagcctcaatgatagatgtggaagatactatagcatagcctgcctttgttggtgagtggcgattaggcctggtggaactgccatcaataaactgagtgtgatcaggatggggaagaggaaagaaggaaatatggggaaatggagtgaatgtcaagtggatcagagagatacagtcatgggggtcaggtgtggtatccagaataatgtgggaggccagattgaagtccaggccagaaacagtggtaattgtgggagacccaaagagtgagtatagctgaaggagccggggagcagaaagtatatgcatcaggtgggaggaagaaaatagattttggaagttatgagaactgtagagagtgagttgagcatagtttgtgatttttagggcctctaaaagtattagagcggcggcagcctctgcacggagacatgatggccagcctaaaatagtaaggtcaagttgtttggacagaaaggctacagggcacggttccggctcttgtgtaagaattttgaccgcagagcccagtactttggctgtgtgtaatgaaaagggttgggatgagttagggagagctagcgtggtggcagcttctagggctgtttttaaggaatggaaagaggagtggcgaaaggaattaggatctatggggtcagctaggtttgctaggacagaataatgggttgtggagggaggtattgaggatagagtatatgggtttggcaccacagggtggctaggcaagacaatttggttgctaaggcacagatcctgaactaacctataagacttgtcaggtttttgacaaggtaaaatgggggaattgtaaggagagtttataggctttaaaaggccatgctgtaacaggcaagtgataacaggctttaatccttttaaatcgtgctgtgggatgggatattggcattgagcggggtaagggtgattaggttttaatgggatggtaaggggcatgtgatcggttgctagggagggagtagaggtgtcccgtacctgtgcgttaaggtggagggatacaagaggaagatgtgaaggaggctttgggttgggaagaagggtggcaatgaggtgtggctgtagcttaggaatagtcagggaagcagataatttagttaaaatgtcttgatctaataagggagctgggcaggtggggataactaaaaaggagtgcataaaagaatgttgtccaagctggcatcagagttggggagttttaagaggtttagaagcctggccatcaatacccacaacagttatgggggcaagggaaacaggtcgttgaaaataaggtaatgtggagtgggtagcctccatattaatttagaaggagacggacttaccctccactgtaagagttacccagagcgtctgtgatggtccaggaagcttctgaggcgatcgggcagcgtcggtcttcagccactaagctgagaagatctgggaagaagtcagtcagagagccttgggccagagttccaggggctctgggagtggctgccgggcgagttggacagtctgatatccagtagggtcctgtacaaatgggacacggctaaggaggaatcccgggctgcaggtcattccttggctcagtggccagatttctggcacttgaagcaagctcctggggaagaggttctggaggaacccctggcagctgcacttcaggtgtttggagttcttgtgtgctggcaatgtagctggggtttgtctcacagtggaggcaaggaactggaacttagaaatacattgctacttggctgcctctactctattattgtacaccttgaaggcgaggttaattaagtcctcttgtggggtttgagggccagaatctaatttctggagctttttttaatgttgggagtgggctggttaataaaatgtatattgagaataagacagccttctggcccctgtgggtctagggcagtaaaacgtcaaagggttgttgccaaacgggccatggactgggctgcgtttttatatttgatgaaaaagagcctaaacgctaactgatttgggagaggtcggataaagaaaaaggaacattaaccttgactatgccttcagctccagtcacctttttaagaggaaattgttgggcaggtgggggagggctagtcgcggaatgaaactgtaagccagaatgggtgtgaggggagttgataaaaagattatagggtcggggagcagaggctgaggaagaattgggacctggctcagcctgttgaggagcagcctggggaggagaggtcatatgggtctgtagaaaaggaggattcaaaggactcagagcttggtgtggagactgaaggaacagacaggagagaaagaagaaagatttgggatgagtcgcattgggagcagagactagggagggaccaatgtgtaaaagaatgcctggatgtcaggcacctcagaccatttgcccatttttcgacaaaaattatctagatcttgtaaaatggattttctggctatttagaaccattatcgagtttgtattggggtcaagcggtattgcagaagaaaataaggcatttaggttttaggtcaggtgtgagttgaaggggttttaagttcttgagaacacaggctaagggagaagaagggggaatggagggtggaaggttgcccatagtgaagaaggtaagtttaaagagaaaggtagagacacggagaagcggggtggtggggagcagccctgggctgcagtgtgggtgaggagccaaagcaggcatccccgcaattgacttgccaccatgggaatgtgggtgaatgaccaaggcaggcgtccctgcagtgatcagacaccagtgaattgtgggtgaataatcaggcaggcgtctctgcaatgattaaacaccaagggaaggctgtcttcccgagtctgtgactggcgccagagttttgggtccatggataaaatgtgtctcctttgtctctactagagaggaaaaagaactggaattggaagggcagggagattgaagggtagcgagagaggctggagaagagagtgaaaagaccgcttacccgatttgaaattggtgagatgttccttgggctggttggtctgaggaccgaggttgtatgttgatctcctcatggagtgaggcgaggacaggggactggtcttccgaaggagtccctctgacccgggtcttcagcaccaaatgtctcacgcgtcagtgtgaagagaccaccaaacaaactttgtgtgagcaagaaggctgtttatttcacctgggtgcaggcgggctgagtccaaaaagagagtcagcaaaaggtggtgggattatcattagttcttacaggttttgggataggcggtggagttaggagtggtgttttgtggcagggggtggatctaacaaagtacattctcaagggtggggagaaatacaaagaaccttcttaagggtgggggcgattacaaagcacgttgatcagttaaggtggggcagaaacaaatcacagtggtggagtatcatcagttaaggttattttcacttcttttgtggatcttcagttgcttcaggccatctggatgtatacgtgcaggtcacaggggatatgatggcttagcttgggctcagaggcctgacagtaagcactgattctttcttttgtaattacatatatttttaaaaattcctgatagccgtactttttattttatttgcatagtgaaattcctttgtcttatgaacagtttttctaatattctgtggtcagttgaaactatatttattaatttttatctcttaattttttggataatttttttttaacaataatagtgacatatttgctgcccaaattcaaggagacccttcctgcaccctgccccaacccaagcgcatttttatttgactagattattgaaaccaaaagaaccctttgagaccgagtgggatgattgcttagtggaaataggtcaggcagaagatgggtcagatggggacctcaaaacttaattttagttttttaaaatgttagtattttctgaaatggtactcagagttagtagataaccccctttaaattgtgcatgtttgtgtacatgtttctttttttctgcagagagagaatccctatctttcataattcataaccagtataacctaaacaagttaatattctctcactagcctagatcgtaaacttgatgaaattctgtttaagattagcacctattaagacactgctcagtactagaggatatttttgattcacaaaattttagcaattttttttagcgtatttctatctaaaaatattacttttaacaaatagcacatgatacttcagtgggtgttttaatatatctagattatttaaaagttaatgttcatattaaaattttaaaaggtgctttaatgtacaggaaaggaatttgtttaaaaatccttttgagaaatcatattctagttttttttttgttttttggtgaatctaggcttttcacgtagcataatactgtgatataattatttaattttctgcacatcactggaatataaaatttcatattaatccagaatgagcagaagtgaataatataatttcctcttaagttctcttatgttaaaataattcattttaaattatatatggtttctccctaataacttacagctaaagacattgttttacttaacaaattcaatttacacagatgtctaaagatgaatagcattcttatttgaaaaatataagttaaaaacaagattatgaatatattcaaaacattttagttaaaggttaattaatgcattatagatttaagagtttaaaatttaagtagggaattgaacatttgaaattttgctttcccattttgtgatggtatgaataaatccaattcaaatacattttaattataggtttaaataggtgaacttttataaatagttattagtgagtattctgtacattttattagcatatcatagcatatttttgttctaaagactgataatactattttattgggaaatattaagataaactttgttacagtttctacacttaacattttttttctttagctctcaatactctaaaatttatgagatttccattggttttattagtaatgtctagaaaaccacttctttgtaaaaccatgttttcaaacaattgattgtgattaaatgagtcattgggaattaggaaactcttaagtaaccagtggtggcaaagtaggagattaataccttaaagattttctaaatggctctttgctgtcctggaagactaatttatatctaatggcatttaatttgtttatagggaataatattaataatttattcctaagaaagttacagtatttaggaaaaattacaaaaatacataataattcaaatttgaattttcaggaaatcttagttttctattgcagtaattgagtttgtctaggtgtatgtgtgctttgctgttataagcttactttagatgcttctttggaaggtatgtcttatttgggtatgtcttatctaatattgctgattaatcattaccatattagccattttatgaattactgaggcccttttagttctctttccgttttcatgtttttcctattttcacaattctaccaaaaatctaaaagggaccaaaggcaatataaatagaagccaaaatttctattcttatgttactactacttgttgctcaacttaagtctgtttaatacctattcagtaattgaaatgatattttttaaatctcctgttaatttttactttcacaaagctgaatggctgtattaaaactagttcaccaatgagaaaaatataaccactaaggtgtggaaatgaagaaatgtgtgttttgtttttgtttttgtttttgtttttttaaagaaaaagggttatttaaagtgagctgagggagatgggtgggatccagatgcttggagctgtctacttccagaccaggttagtaacatgacgccattcacacaaaaaagttgtttttcctgcatattgtgagttggtggtcttggtccttttaattaaagataagaatacttgataaaattacatttcttgttgatcatcttttgcagaaagacggagaattacattggtaaagaaccgctaacctgtcccctcacccccagggtgtgagcagtgaaaaggattaaggcccactgtagggaagcttacactaaagcctgcactgccccttcccctgttctttcagctaaatagatttttagttcccatgactatcaatctggtgcttttcacaagcactaaattctcttaaagaaaattaaagatgacttatttttttagaaactggcctggaatactgaaagatggtgttttttggtactttgtttcatgttgacagatcccatacatatttttttctgatgcatgttaatttgcttcagcttgttttgaatttggagttgaaataaacatttaaaaaccaaggacaggttgttatatgattagatttgcttgtccacagttagcaagtgtagagttcgacactgttgaatcttacatttcattagaaatagctacctgacagccttgtggacataaactctttaacttttatctagatgactacaattataaagtgctttcttttaaaagcttttaagtagcttttataaatgctgaagtgtcattttttttagtatctgccaaattggtattgtatttaatcttgaaaatatattttgattttcttaactaacaataattgcatagtattaaacattctcagtagctcaaccttttttttttctatttaatttgagcttttgttgttactaacaaataatttgtggcacagtttctttccttttttttttaaatgactgctagaatctatatacttgtcaccttagtgtgctagaaatgttccactcaaatcaagggttcctttctggttttgtatgttctcacctgctcctcactgtaaatcattgagatgtcaagtgcaatgattaattaagctgcacgtgcaagtgctttttttttcacctgtcaagcaggaaagaagtcttatagcaaaattagatggtgctaattcacagcttttacttcagactgtgaagtgtgtagaaatattttatatttatatgcttattcagaatgtggcatatcagggcttgtttgttttctaattcttaaatattgtaagatacaattattataccaagccctatcattaaactcctaattataaacagagaagaaattcagaattcctacttaaatattttggaattcaagatttatactttgtaattatcttttattcaaatactagtagttgatttaagttaaagtaaatatttttaagttttaaaattgtgtgtatgtatgtgtctatatatcataatgagatctattcttattatagcatgggtttaaacttctgatgaaatgatggtggtaactacatttttttctttaagtaataagtatttgcagaatgtagtattaagcttttgggtactattttatacattaatataaaacagtgggcttggaaaacttgttctgctctagttctttcatcatccacccacccccaaaatcatcagtaaaagtaaaacctcaaattgtatagtaatcttaatctattattaaaaggccctagaaagaaagattacaaggtagattcaggttttgaatcggttttgccattggtttagcagcgggtgggcaggcagatgcctgctcagagtagaacctattgccatttttcaccattgatagagtagcctttcagagtcaatgagctctgtcaatgtgagcttgtcaaggctacaacttcatagacctgagaggcggtttgagaggtcagcccttttcaggttcgctgtgatgcaaatgaactttaatgcttaaacaactattggaatttttatgtctgctccttgttcttttttcttcacaaagtcattgacgagacattcagtgctttttaaattggaagttgcattgtgctaaagacctagtacagatttacggagggctgaaagcagttagatcatgttcttttcatggtgcgattagaatcaaatcgatttccctacagccttcagcattcagatggcaattttaacaaagcttgggggctagacaagggacaaaacgaccgaactgaatgttaattacactctgcagccttattttcttttgatttggggctgactggcaactaaattaacaaaaagtgtgaccataactgctgccctattttcatttaaaaggagagctgcctctaaaaggctatctttacaaagaaacaagtgaggtctgctgatcattgttaacaagggcacttttttttctttaaaattcttgccaaaaagactcttcagaaaaagtaatgtaataaattagtcattggcatattattacccagggaagtagttgattttccgatttttatgacataagcttggaaaatgtaaggcagtagtcgtaattcattggtagttatgaattataattggcatctatgtgactttggtgtgtctttagcatgtttaatatgctaaaaggtaatgtaactatttaaagtagatactttaaatacatattaaaattttattatgtaacattaaactgttcaaacccagcttgatcctaacagtttttcacctagctaatccttgcttgacacgcaaattttcatatttgattactagtacttctttataccacattaatagtggtaagatgtttttttctttctcttgcaagaaaagtgcagctgaaccaagttgcaagttgatcctggtggcaacactgtcatttttgcacctgcagctgtgtcagtctcatcctaacacctggcaccatgaattaccctcttttattcatattctcaagcaagaaacatttcatgcagcatagcatatcttgcaaaaatcaactgaagtaaattctcagttgattcctgaaacagtagtattgaattaagagtttgattttactatcagatgacacttttatgttggtttaaataaaattttggctctgttcaaaaaatctattggtagaataatcagtaagctggcttttaaatatgggcattattttaagcatgatgtgaaaattaatttgattttataactcattgatttttttaatattccaattttttgttttggaacttactgaaaggccatttgcattttgttaactaatatttacttttgttttaaaatatgtattaaggaacttccgttactatttaagtattggaaacatttttgaaagaagtgggaatttaattttatttggcagatgacattagctttttaaaccttgatagttttaaatcagaggctagtaaaaaaagattcgtatgataaaaataaaggcatatcttttttaagaaagagtactcttttgtgttcaggttaccatttagtgcttagaacatcgatagtgatgcacaccacactatactcagtcactgtcttatacctctccccttttcacagaaaaagcagctgcaaaacaaagttttctaaaaccagtcaagagtaaacttttttctcatttgtcttccagacacgaagatcgattgagaagttattagaatgggaaaacaataggttataccacaaggtgagtaccacagggagcagcttcgtactgttggggtctgaattgcacagtatggaaacagatgcttttgttgaactaaaaatatgaaaggtggacaaatgggttagtctgtgtgctgcaataaaatagagctcatttttcttcttttactttcctacttgtctagctgtgcttgcattggagactgagcaaaaggaaatgtgaaacgaataacatgatggaatatgtaagttaaagggctgttttgtgagtttctctattaaatgatcatttattttgcttctgatcttattctttccatgattattaatcagcaaaggtgtcaggagcttaatctcctgagtgcaaggattttctacggttcacagatgcatggtttcatgtgcaagactgatttataaagttatgaatgacttgaaaacaaggcttcactgtgttctgaaaaataataaattaattgccaagataaaatagcctgaacatgtgttgatggagtgtgaaattttagatgctgtataaagaataaccacaactttggttacgcagcaagtcagatatggcttttttatataatgctaatcaagtttccaagtatggaagaaaacctttcagccaagccattggagcttaagaaacctttaccctttatagattttaactgcccgtacctcagtgccctttaaagaatctcttttaaagtgttattagaatactgctttgtaaaaattaaaagtaagcaggagatgagatgttgatcatcttgtgtttacttgttaaaaaatatctaatttggcatatatatacaatgaattttagaacttactcagcatgggatttaatttactgactccatgatttacttgaacagtttttctccttttgaaaatttcagaatactctagaaaattaagaattttaattctcttttgagcttggatattttattttaaatatggccaggttattactttaaaagaaaagatctaaggaaaagttaatagttgaaaataaaactcagagcctttgtgaagtacctgttacaacatttctgaggaattttgtctattctttaaaacaatatagccatcatagatgtgtgcgtgtgtatgtgtaaaatattgattaaaacagtgtttagttgtaaattatcataaaatcatttttgtctgttagcattttcctgttctttcattatcccacagtcaaatcctatttctagccttgaacataaaaaatatttttaaaatgtcttagactagctttattcaatgaaccaaataatgtagattttatctttactacatcaaacatgttaatgtatgatgatgagaaagacacttgatacttctttataatcataacacatttgagtaactcattttgaggtgaggagactagtcttgtattttcatcttagatagagggtttatgtatatattttggggagagggatggataggagatgtaaagaatttagtgaaaaaaatatttactacatttataacacaaacactaagcttaaaactgaggtattaattttttcatgcatttctaaatttactttggaaaggaaaacataaaagttatcccaatgctatgaattccagatagaactatatgactataatttattcataaaataatttataaccttccaaaacattctgaactatatgctttgtttgtcaaataagtttccttgaatttttagataattaagcacttctgctaaagccattatattattttcactccatcatagaagatacccagaagagtagtaaagataaaataaatatttcaattgccaggaaaaagctgggtgtagtgggcatgccagtagtctagctggggaggctgaggcagcaggatcacttgcgtctaggagtacaaagacagtttgggtaacatagcaatacccacctctctttaaaaaaaaaaataataagctggggagaaaaaatgtgttctgctggattttcttagagtatatatatatatttgtgatagttgaaagtgagaataatgtagcttaaaaaatttataaaaatgaattttaaaagttaaactagcaaataaaattcattttatctaatgaatttgggcctttttaaccatgtgtccctcttttcttcaacttttctttaacttacaggaatttaattttgttaaaagaaaataattatccttgattataatttgaacattggagatactaaaaaatatatatatatatattccaccttggcactaacttttctttgttcagatatggtagagatggatgatttagaataaatgagacaagtggccagtctctatgtgtggcttctgaaggaaaaatttgtagaatatattatttaaaaactaatagttcaaatgtaggcaaagatagcctttattttatgttatgtattaaaagtgtatattataaagtgtggggatgcccatacctggggactaaaattataaagactgattgaggacatacttgaaatacaaaattatttatttaatgttgactcctaagtagtttaaacatttaattgtcaaattttaaagctgcaaagaatcttgttatctagttcaatgcttttattttatagataagaaacctgagaaacaggaaaatctagctcaaatgaagaagctagttgggagaaagtattttaacagggagctagtgaatattttgtaggcaaatcacaggtcaggagagtggcaaatgtgacagctaagccttagtgcaggatacctagagtaggacaggaatatttttgagccaggtatagaagtgtatcttctttattgaggcagatcaaaagccaggagaactgaagagtgaaaatgaagattcctggcccagacagctaatttgtagaagtattgaaatctggaggtcatatcaagcaagacacagtttctgaaaaagaatgatgagttcactagacttagaaacttttaaaatcaaataatttttaaatcaccatctatttaatacaaatttggagcaaaagaaagagttgactgtaatttaagaaaattcaaatttggaaaaattagctctggtcactttgtgtaattctgtgttaccatattttgtttttgttggttttcctttagtttcctattaaaaggccttttggaacaaattttagcctttaattttgctaacctaagaagaaatggactttttaaaaaattaagagataaaggaccttttatctaaagattacatattctggtagagtaaaatgagagcaactctagaacttagagaagactcatgtagttgggttgattaaaaaggagaaagtctaaagaaaaatgttgggtgagctgcagtcacgtagggtggtataaagggcaaggctttggagttaagacagtcttttattcaaacagtgactccacattcaattgtgatacaacttctctggatcatcagtttcctcatctgtgaaataaggattataatacttgcctcatagaaaagttgttgggtttaaagagacccaatgtagtatggaacacctggtatacagttagttctaagtaaatactagcctcttttctcatgagtgcaggggagcgtgcatgtatgcatgtttgctcctccagtgtatcaggggcactatctatatcacccttctcagactttggtgattttacttgcttatttgtcttccttttcatagagccaaggtatttcgtgtatttggtaaaggtccagaaataaaaagaaaaattctcagtgatggaactctgcattatcagataaagatctgttttagtaatgcaaagttgcgttttaaaatgtgaatggattttcaaaaaaattgtgaaagcatataattgaagttttaagaaaaaattttgtttaaatcttttaaaacctttttcttctccttttacaggtcatcctcatagaatttttaccaaagacaccgatttttcgaccagattagcatttactttatttatagagactttccaagtatgttgtctttccaatggtgccttgcttggtgctctcctggtggtgacataacattggttctacagaatcgtgtggtgttttttttgtttttgtttttttttttttttaaataaccgcatgttctaagtgtgcatttttgtcaatctttgcaacagttatttcatacagatgtttaatacttaagttattgtgctcttttctgttatgtattctgattttcaaggattacttttttgtattatcaaaaaaatacatttgaacttagcataaaaagtggccagccttttttattttgtcaccaaggtacacacagtcctttatttataaattccttaacagagaaaaacacctttgtaaggctcaacttacctattccagcaagcacactttttctgtcattttttctttcttttcaaatttgatattgtcattattttaaaatagtaagttttctttaatagtcttttgggacctaacataccctttctcatacaattcctaatgctctgtttatggcagataatctgtaatgttatgaagacctatcaaaaagttttaaaagtatttctgtcttcaaaggtagtaagacaggattaaatttttattagaatagacaaatcagtgaatggtatgcatgtatctagtggttactagaactcaggatcacacaatatagtagcatcacgatctgtgtatatttttgatcaagatgataataatggccttacttgggtttttatcgtttatcaaatcttacatacaaaagagtggaagtattcctttacaaaatttctaaggaaaatatttcttccaatctatcacaattatagaatggatatatgtttctgaaaagtttttgaaagaaagcaaaagttctagaactaaaagtaagctggtatttaatatcccgttgatatttagaaaagattgttaataagaaatggaggatgcatttagtactatttttatccactagttcactttcagtacagttatgtatacttgttttgattgagagtgtgacatacatgttaaatcagattagcttgtttcttttaaatatacatatacacaaatacatataattttttctcctttttgttgtgcatatctctatgcatttttaaacttttagatttgtgaatgacctatgtgtaaatttttgtttttataaaccagaaattatacaagttttaatgtgtgtcaacaacttgttccatacaactgtggtatcgagcaataatgttaataacttttggaattatataaactatgcttaataatttgtattgagaattggtaccactatacaatacttttttcctgtattaaatcttttaaataccagtttcattaatttatatacctgtatttttaaaagtatttctttgtacttgccaaagtactgtaatcctatataaatttgaatagtcaaatgccagtatctcatgtcctatatcctgtcttggatattaggagctatcttaaaaactaggatttaagatttttttttgcttgagaattatatgttttccttgccccccaagtaacaacttgaatttgtagaacacttttcctgtgaagagttcaaagtacaaagaactcaaatacttattttatttaacttgtatctagggtgtgtcctaccaccttaaagtagtgcaattaaaaataatgccatctagaaacttcagtattcctctgtggtttcagtgtgaaaaataattgtatcttcatacaacgctaaatctgcctcaggattcagaaagatcagaaaaatataatgactgtgtaaactatgcaacacagtgttccctgtataaaattgtataaatccatagagcaccatattgataagctttatgagaagaacttatctatttacataatttattctcctgttattagtctactgtggataataattttaaaattactatattcccttagggatattttaactgtaagataattttcatggttgattatattaagtatagaatctttaaaagcttttctgattttattcagccatgtgccatttgcttaaagattccctagaaacatacacttcaatgtatatatagaaaataactgtgaatacttaatatgtggtattataagccagttatgccttgggcatttagattttcatgcttggattttcattagtaacctgtagtataactgtatcctttcttgaaccatgaatttaagtgcccacattactggatagtagagatgcccatattaagtaaacatcagtctaaggaaatatttaaagtgatgatttttcttcagcttctgttttctgacttaaagtttgtgggacataaactgtagagctttttaaactggccaagaaaaaatattattggcagaaagtttggtatatggattctacataggctaaggtaaataacttatggtctttttaaaatacattactggcattttacaatcagtcaccatttctgtatagaaacattcttttctcaacaaatgtacgttgacaaccctgttatattttaatatataactctggctatctgggttaaaatgatactccaaagcctaatgactatagtaaaactgatgtgacacatttagcttctaaggtagatgttggccctcccttacatggagatcaccttacctatctaaaatgatcatcagatgctttattaagactctttaatgactagatttcatttatttaaaatataaacatgtcattttgccctaaattcaacaaaataaattcaacaaagccttgaataatagtaaacaatgattattttttcttatgagaaaaactagttttgtaattgaataattttaaatcaggaagaatccagctttccccaaggttttgtctttagtgttattttttcagtgttagagagcttctggttgtttctttatattaatagacgcaggccaaccataaaaatctttgacaatattctgtctctatctttggatgtaaaaggacattaaatagtaatacgtacagttggacccacagttgcatgagttcaaactactagttttgtataacactgtgtacatagtcagactgtttcaacttttgtggtatttagcttcacaattataacctttaactgcatgcttgatgtttcactgtaaatatttgctttgacttgctgttaatcagtagtactaaatcaaaactatagtgtgttaaagctgtcttggactgaactccagcatctagtcctgcaccctctttctttttatccttttggacaccatggattcttttgctgtcctcctgatgtccagagtctttacctaggcctgaacatagttcagaattgcatttttatctttcttcctcaaagctcccagtaagaacagtaatttttttttttttttttttgagacagtctcactctgttgtccaggctggagtgcagtggcaccatcttggctgactgcaacctccacctcctaggttcaagcaattctctgcctcagcctcccgagtaactggtattacagacgcccgccaccacgcccggctattttttttgtattttagtagagacgaggtttcaccgtgttgcccaggctggtctcgaactcctgtgctcaagcaatctgcccacctcggcctcccaaaataagaacagtaattcttttgtattcttaggtaggtgtttagaagaccaattaaagtaagtcgcattaagtgatgaatggctgacaccctcagttctgctaaggtggtacttgcattttaaaaatgcattttaaaaagagatttcttaattgatgcagtggtgcaattgatgtttccttctgaaaagaccctaatggtccacgctttctagggagggaacaataggatggttggacatggggttgcttctcaaacctgtttttgaaagaaggtgattaataattagtttttgggaggaaagaataggctaattttaaaccaaactattaattatcccatagccgtttgtgtttatttaaccttttcttaaataaagtaactcttaatttttccttgatatcatggccaactttatgttgtttttaggaatatatcttgagatttgaagaatgtctttaaatcttgaggtatcttgttctgcacttctatggagatctttagataataattaagagaagcctaaatattattggtattattaatcataattctatctgtttctgtaatatggagcattatctcccccacccaatggcatattgaactaacagaggttgtttataatcttaataggtagtactgaaaacagaaattcaggatgttgatcctgatttggaactcatttctggtattctacaagatcatccagctacttggcctttttggtttcattttcatttcccaagcagggagatactatgactacctcatggtgttatcttgtgaagcaatatttttcgatagtttattttcctgttattaagtcctatataaaagtaagtagttagatgtttaataataatgattgaataggtttttcaatttatttacaaagtcagcgcaaacttgaattattgtcaggttttgcatttaaagtggaagagattgggtattccctatatatacttataatgctttgcatgtttaaaaatcagggaaacattaaatatagtactttgaagaaagtttctaataagatttttaaaaatatagttacgtctgagatacttaaacaaaatcatgcctttttttatatcccctctatttcatagacatggtgctctgatattgagttgattacttttttctctttatgaaaaccagtatattgctttcctagctctttatcttagaaagtattttgatgaagtgaccatacccggtatccttaattttggcaaataagctgtatattgctctgttgttgtttatttaaagaaacatagtgttaagcagccttcaagagacataagtgatgggtcagtgttttgtctactctactttattgagacataacgtaccctcagactgcagagtttctatcctattgtgtcttctactggttcttgatgtagtataactggttccatttctttttcttggcataaattctgtatagatttaaaatattgtagaaggaaagagtatttcctcaagaaaccttttgctctaaattaaagaactcctcttcctttagtagcagctatttaattaggtaattagaacaatctcattacatggccaccaagtctttataaacaggagcttgtttaacgcaagtatcaaagcacttttaaattctgtatttctttttatgtttgttgaggttattagcattatgccctctcagaagggtaaagtattgtgaaacttaccggttgtggcagtagaagcaaggcaaacatgattggaaggcaaaatgctgaaatctactggctgagagaaataactgcattattatcctactctttggtttacaagggtgaatgttatgcattggtcaggaattgcacacagctttttgctttctttatacattctttatatattacaatggaaattatttttaaagaaaaagaaaaaatattattctagatagaattttcctttatcatcatgtcttttgagaagataatgggaggctaccttgaaacaaatatacttagatttattttttataatataaatgtgaccattaaaaaaaaaaaaagggttccaggaatttgttccttcatcttttttttttttttttgccactaatgtaatttatatccttaaatgaacatggaatagttttcatataagataatcagaaatttctgatggtgagcacttatgtagaactaagagcagggtccctaaaaatatgctttcagataattatacagcattcaggtaagtctagtaacattagaaaatgaagataactggtaaaatataaagttgaatgtaaaagttatgtattatgtttttactttcattattaagatattaatcccactgccaaataaacacggttttttttctttttttgagacagagtctcactctgtcgcccaggctggagtgcagtggcatgattttggctcactgcagcctctgcctcccaggttcaagcaattctcctgcctcagcctcgcaagtgtctgggattacaggcgtgagccaccaagcccagctaatttttgcatttttagtagagagcattttgtcatgttggccagactggtctcaaactcctgacctcaggtgatccgcccacctcagcctcccaaactgctggggttacaggtgtgagccaccacaccctgcctatttttcttaaaatgagattgttttgttagataaaaacttgttggccttcataattatgaagaaatacataatgggttatatttaaggtggcttagtttttggtcctgtgttggttgtagtatatttagtcttgtaaaattaagtcttcattgattgtattgattgttctttttttagtaaacaaatggagactaatttgagctagggatttttttttttccccagttttggcttgctttggctagttgagttttgttgcttttaagtgagtctactacaacatgtcatttcaacacaccattccatattcaaaactaaaatatgggctaattcacagcattttgtctttaaagaatataatatattaaataagatcgtaagccagtgtatttggaattggaaaagggaatctggaacttagatcaaatcactttaaaggaaattggccaaactaataatgtctgttaaaatgaccatatgaatgaatgcgtacacgcacacacacctgcttctgtagatttgacctgtacaatgtgtggggaaaaactaattaaattgacgtcattatgaatatgagtttagaaactgtgtacaatgaatttaaataaagttttatgttatatgttcatggacttacatcatagttggaaaaaagaataggggaaaaatgtagcttatataatataatattaccttttttttccccacagtggtgttttagttatcccttaagtttaaaattaatgcagcttgtaaataggattctcaattatcccgtttcagtttttaaactttcagtaggaggcagaaataattccagttgccacttctgtaaatagacgtttagcactatttgaaatagcttatctgtggcattgtatcaagtgactatttgtaatacaaatttttcattttactcaattgacccagattccagtctaaacctttactaatatagatccatatatggaaatacacatacacatacacacgcagaatctcagtacactaagacatctctttgcagtagacagtaaaggtaactccatcacctggattgtttcagttaaaatacaaaatgacagttgattctatatgaaacataaaaactaaagggaagttttgtgagttagtcttgtttccttgagtcatcatactgtagtttttaaagaattgataacttattttctgaatttttattattttattcacatttttcatcctgaccagaaaaacgtgagcattctcagaagtgacttgtttcttttttcacaaagagagacctatgcaaaaaatgccattgctgcttgcactagttactatcttagaatccatcacagaaagcccaaaagatagcacaaccttttgtacctacagtcttagatattgttagatagccattcagttttgtttgcattgtgtatgagatgaatatttcttgagacttttttgtttgctctactaaagaaatcaaccaagggaaaaaaaatccaaaaaacaaaacaaacaaaaaacaccctctaactcatgtgaagcatgcagggtgttgtaatttcagtttgcaaagcggtgtgatacaatgttgctgagccaaaagcacacgatagatttaatgtagccaattgtgtacttttgaaaaaaagagtaactgttccctgtgagttaattttggatttcttcaaaatctctcttttaggctttgtgctggattcttccagacaaatgcgtattccatgtgggccactgttctgctaaatgctctcagttctccttttgcaatcaagattatgttgctaaggagattttgcttttattgctgccattgatttgtgttaatacgttttgaatacctctcggtattctttcgtagacaaggccaaaagaaaaacttccccgagtttcccaatttacattacaaatggagcggtggtgtaatgaagccgatataaagtgggcagttgaaaggagactaaagaagggcactcaagtgagaaatgaagaaatgtgccgagtgcagtctgtgggctgcccttggtccagctgcaggaactggctctggccagaggtagagtgagtgagcacctccctctgcaaagaccacccacttttggagcctaggctggcacaccaaagattacctcattgattaatacagggcttgaaaatttctgaggtggcaaaatcacttctaaatctcttttttgagtccttcctagagcatgactgaggccacacttcctgtgccttatgacctgaagttgtaaaggataacctatggatggaccagttcttttggttctgaggactagtgtatttcaaatgttggaatgtattcctaggtgaggaggctattaactagattaaattggttttagttatatgcttcttactttgtgtcatattttagactccaaaaactgtcttcctaccaaaaaaacccaagtattccatctgtgagtggaaagagaccaactagatgtgtctttaaccagcgaagtggtttgctcaggttgcagtgcgtggaggtgctaaagaatagcatgggccgggcgcagtggctcctgtaatccttgcactttgggaggccgaggcaggtggatcgcaaggtcaggagattgagaccatcctggctaacatggtgaaaccccgtctgtactaaaaaacaaaaaattagccgggcgtggtggcgggcgcctgtagtcccagctacttgggaggctgaggcaggagaatggtgtgaacctgggaggcggagcttgcggtgagtcgagatcacgccactgcactccagcatgggcaacagagcaagactctgtgtcaaaaaaaaaaaaaaaaaagaataccatggtagcacagtcataccctttaatggctcacattgttcaaacagcatgatattaacttttttttaaaatcaaagcacaaatgcttcatgcatataacttaaagagttttagatattttaagttagaaatgccaaaaatataaaaaccatgaagaaaaatttctatagaagttaggaaattaaaaatcgatcataagggaagcatctcaggtttttattgcagtatttggagatgaaaaatgactttctattgacacgatttgttatttcagcaaaatagaagtctgtcagtctaatgttggatgatctgatagtctttgcaagaaataattgcagagagtttctgcaatcactgggaaatagaaatctataaaaacatctgaaaaagtgtgagactgggccactgcctagggggatagccctgttatttctatggaacaggaaaaaaaaaaaaaaaactctgaaaaggaaattcttaattcctgtatttacagtgcctttttcagtaggtttttcctgcaaagggtgcttgtcagttactttgctttaatggataaaatctcaatttccaggccaaatgtaactttttttggtcttacatcttgatttacttgtacttaagaggttttttctccctgtaatatttttaaagcttttaaaattaacttcagcttaaagacaatataagtatgaatttctgtttccagccttgtagttctgactgtatttgtcaatggtttctatattaacgatagcattgttccattgtgtaatcctaaagttaaaaattctaagaatgagaaaaacagctatgaataaattataagtgaaagatagaaaaaacacatatttctatactaaatattgagagctttgtatttttcaagttggaatcaatatattgagaactgactttaaattttaaaactcttatgctgagaaaccctgacaggtaggtaaacccgtttgtctacataagatgttagcagtgtagtattgtgcacatcaagcatgttacaaaaactctaagttattctctgaagatacataagttttactagagatactctggatttattagtcctgcaaagccagctttttatagtc

SEQ ID NO: 970 - DNA, 1032 bp, Homo sapiens
tgtcggcctctgggcggatgttgacattgtgttgttgttattgctgatggtaatggcggcggcggtggcggcgacggtccagaccccatcccctctgtagccggagccgagacagccgacagcgaactccgcggcctcggagccggcggcagcggcgactcccctcagcctccgccgcctcgcccgccggtaccccggcgccaaccccgggagtcaggccctttgggcaggggagctcggaggctcaggatggcggatttcgacgaaatctatgaggaagaggaggacgaggagcgggccctggaggagcagctgctcaagtactcgccggacccggtggtcgtccgcggctccggtcacgtcaccgtatttggactgagcaacaaatttgaatctgaattcccttcttcattaactggaaaagtagctcctgaagaatttaaagccagcatcaacagagttaacagttgtcttaagaagaaccttcctgttaatgtacgttggctactttgtggctgcctttgttgctgctgcacattaggttgcagtatgtggccagttatttgcctcagtaaaagaacacgaagatcgattgagaagttattagaatgggaaaacaataggttataccacaagctgtgcttgcattggagactgagcaaaaggaaatgtgaaacgaataacatgatggaatatgtcatcctcatagaatttttaccaaagacaccgatttttcgaccagattagcatttactttatttatagagactttccaagtatgttgtctttccaatggtgccttgcttggtgctctcctggtggtgacataacattggttctacagaatcgtgtggtgttttttttgtttttgtttttttttttttttaaataaccgcatgttctaagtgtgcatttttgtcaatctttgcaacagttatttcatacagatgtttaatacttaagttattgtgctcttttctgttatgtattctgattttcaaggattacttttttgtattatcaaaaaaatac

SEQ ID NO: 971 - protein, 165 aa, Homo sapiens
MADFDEIYEEEEDEERALEEQLLKYSPDPVVVRGSGHVTVFGLSNKFESEFPSSLTGKVAPEEFKASINRVNSCLKKNLPVNVRWLLCGCLCCCCTLGCSMWPVICLSKRTRRSIEKLLEWENNRLYHKLCLHWRLSKRKCETNNMMEYVILIEFLPKTPIFRPD

SEQ ID NO: 972 - DNA, 22293 bp, Mus musculus
  misc_feature (1)...(22293): n = A,T,C or G
agagatagcccagtagttaatggtacttgctgcttgcagagaacctgagcttaattgtcagcacacacacagtggctcacaaccatcagtaacactgccaaaggatccgacaccctcttctggcctctgaagaacactgcacccacgtggtacacacaaactcatgtaaaaacacatataagaattacgttaaaaattttaatttaaaagtcaaaaacaaagagaactgtagtaaatttaaaagtctcagcagagtaccatgacttaattctataacctcagccattgggaggtagaagcaggaggatcaggggttcaaggccagcctcaagtacagagcaaactccaggccaggaaggagttcatgaaactgttgaaaataagaggtcctggggctgaagagatggcttagagctccagttaaaagcaccggttgctcttccaggggacctgcacctcaattcccagcacgctctgaccccttcacatagccacatgaaacaccaatgtacattaaagaaagaaaaagagaaaacataacttttgcgagagtcttcataaactgcaaagtgctatgtgaaggtaagagagaattgtgcttcagcaggagctgtggagaccgccttctcctgcctatctcttgtccatcattgagtgagtgtgagcaaggctgtttccagtcccccatccccacccccatgaacctccatctctcccagctctaatccagcagggggattcacacaataaacaaacctactcagcacagcacacagtatggaagaaagagataactgtcttaagagaagaagactatctgatatggtaagactatacagagtatagagtaaggattttgatctaaaaaaaaaaaaaaaaaaaaaaaaacacgtgggaaaatgatgtctgaggcaagacctcaagttgaggaaaggaagaggagacagagacggccatgcgggaagcaaagctgaggagccaggaggcctacagttggaatggtcagagagactgacaaggccttgttatggagggcctttctgtgtagagtctctggtctcattagctacttcatgctccttgatttacaggcaagagggcaacttctctgtggttcactgacattttgcaaagcagtcacacagaaacaggaaaccccaaatttccagtgtatgcagatgatgcatgagatgtaaagctatttaattttggtctgtcccctccacccccacccaccgccagcgcctaacacagtctggcatctgttggcacaccatcaaagcaggtcatgtaaatgaatggaaagatgatccgccaggcaaagagcaaactttgaggcagtgaaagaggtgagcccaaggcggtgcaccctggctctgactggaggggaactccctttagatggcctagccatgccctcagctcacacgtccgtctcttccccccccccccagcaccccgcgcgcgcacacagtgtctgcctcgaacccgcactggcgtgctcacaaattcgcattgcacaaagcgcatccatgggtccccacgcactccacacagtgcggacacgcacactcccctcgcacacactatgtctcaccttcacactgattctcaagtccatgtactcccgcctacccttcctcccccagcacacacgccacatactcaggcgcttgcctacaagctcaagttctcccgccccacacccacgcatgcgcacgggctcaggggaggagggggagcatgcgcacctgtggtggctctgccctgaagggcagctgctcaggtgggttagggattgatggtgccttgtttgggaggctatgggtcggtgcaaccgtgtggattcatttgtttttatcccgcgagcttgacaaggaagagggggagacccgggagggcgcagccgagcgctcggagagcagggtgacccgcaggataccctgacgctggggctactgtatgaatctctgcacccggacggggcaaatgcatgaacttgggatcggttcagctgcacaacctgggtggccaggttctgtccattttgatctgaggacaccgtccactgagagctatgaattgcatgaaaagagaagagggacttagcttgaaagtgcagcacttgggaagctgaggccggaagatgcaagttgaggccattcttggctgctgtgtgagatcctccctcagaagagggaagaagaaaccatggtcaaatattctggctctgctattttctggtgtttcgcagcctcggtttctctgcctgtgaaatgaggagccagactttcagagcaggtatgacttctcatctaggcggactatggactgcctgtctgacaaacactaagagttaacacaacagacccagtttctgcttaggtgcaatttgaagtcatctgggaaagatacccaaccagaagttaaacctacagaaattcagactgattgtagtgagcttttgaaataaaataatgaggttttgatttcattcagagcttcctgtgttctggacacgggtgcataaaataaggctcccgacccctaccctcctcttagttccagtctgctctttttttgtcacatgaaccatttgaccgagccttggaactttagtatgttggaaagccacatgaagcaagggttggaccataacaaaaaagaggacataataaatgtaccttccccacagcatcattgtgggagagaaacaccgtgtgaagtgttagcctactgccaggcacacaacggtcgcccatacatatttgctggcagacttgtctagaaccccaccttagagagatgagatctgagtcctggccttggcatctctacctgtcagacctagattaagccattgaccttgcataggcaggggctctgccccacaaacagctgaggtgatgtcactttttctaggagggctgctgggattaactgtgttatgtgggcaaggctactttgtctccctgacacacaaggctcttgaagagggtggtcttgtgaggaccattataccctcaaatggagccctccttcatacgtgggtgagcatacagctgtttacttgggggaaagtttcaaagtttaggatacagccccaagtagggaaggcaggaatgggactttggactaggtagggagtgggatgtggtgcggtatccctggcacatctcaggtccatgaggctgctgcccagaaatggaaggttgaaggagccaaggagaggggctctccagagtgggtgcaaaagccttgaagcctaaggaggacaggtctgggagaacttagccctgagctgaagccacacccagagcctctgatggcatctgctctgaggacagctgaggtgctgagcaacaacaacaataatcataatcagactttaggcacaatgggccagcagtccttaattcctcacaaactgtcaaggatgatggcttttatttttcttacttcacatacataaaaactgaatttcttctttcagtgtctctggcttcatttcagctctctcaactcaaaaagagagagagagactcttcaggactctgtgtgtcctgtccctgagttctttgatggtctgaaacttattcctcacgatcctggcagatctcattttaaatgtcacttcaggcatcgatttttgccaacacccagagctttctttcacactcccatggccttccgtaacctaccagctctaagttgatttgttgatccatttaataatgtattgggcattcccaaggggctggccttgtgtgctactgaattctcagctgagcctggcttatagtaggtgcccaatacacacatttggggtggggaaacaatgctgaggaccaagcatagccccctttgcccatcaaacaagtactccaccactgtacttttccatttatcaaagggttggatgaggttgggtgggtggggcagtgttaagtcaatcgcttcttgttccaggatgggaggaggaaggagaaggcctttctcagtatttgctcaggctgcctgtcatgaaaaatctgtaggatcttggtggggtttttgtttgtttgttttctgagacagggtttcactgtgtagatcaggctgacctggaactcacagagactcatgggccttaaaggcgtgcgctaccacgcccagcaaaactgggttactttggatgtttttataaaagctcactaggtgttttttggtagatgaccaagcttgaaaacaaaacaaaacaaaaacaaacaaacaaaaaacaatgagaaaggctgaagagtttctcaagtacaaaggttcattctccattgggttaaaatgaaaaataaaagtgcagggtccagggacttagactcctcatctggcatccttgaaagaaaagaaaaaaaaaatgaaagtggaggagagaaggaggaggaagggcagaaagaaaagtgttttgatccccataattccgcagctgtatcagtccaatgcttgcagcagcgagcttgggctgaggggagtagggaattggtgttcggtgaaaaactgccccctgccttgcctgcccccctcccctccctacnnnnnnnnnnnnnnnnnnnnccctcccctccctacctcccctcccagtctttgcgaaggcgcctttgctgtaaagaggagccaggctgagaagtgccagaagcactggagcgggagcgatggagggagggagggaggtggggcatttgcttcaattatccggataattgtccccacctcaggcctttgttactagaacgaaacaatattctattggatactgtctcggccttttccttgggctccccgtggtgcctcgcacacgctggtcacagagtaggcactcaataaattcattccagtgacagacgagcgctttgggagtgggagagggatgcctgcttagaatttggaggtgggcaaatctaagttaaggtgaagtgggggcggcggcggggggagggtatttgctgccgtcaaaattctgttcctagggccagaaggcccggaggagacagacaggcagcttttcctgaaatgctgagccaaaccgctgactcttttctcagaagacaccccctccctttctcagagggctcgattgaactcctgcaactgtgtggagcacaaaggggaattcaggtctctcaaaggcccatctactctgaataaacaccaggcagaagcaaaagcactttgggtactgcctcggcacagggtctgcaacctgttacctctctggattgggccacgtccgatttacattaaaagcaacatcactaaggcctttcagtagcctctcgctcagccagtgcaggaatgtggggaccgggaccactgctttcaaggtggggaggggagagagaaggcatttgctaattgcacccttgcctttaatgagattcttttcctccctactaactcgcttgcaggttacagccttatctggggacccacgttttccactctggctccacatcctgggaacaatcgccactccagagcctgaatggaaagcgagggcgccccatttctgctgaatggctgtctcagttcatcggacgctggagggcttttgatggcctcaatacaagttacgcccaaagagtgtctctttggtcagatcgacaacgcttggtttcacgtttgcaagttaaacgggccaaaacccagctgaaactcccacgccagacgccgggcgacatttccctccaccccgcacagagcaaaactagggaaagggactgggcagggggagggaaggggggctggcagggagggggagtggaggagagtgggtcctgattctcagtagcagtctaggagtagatgggtgggtgggggggtcgggggtttgtatttttcttgttttgtatttttttattttttttaattttgctttgctgacagctttacccgcaacaacaacaataacaaaataaaccgagagcatttttttccttgtcttcacctaggtagctgctttccctgaaaactcgactccttcataaaatcaaaatttatgattattcaaatgttgaggactgtgaaaagagaggaagaaagagagaaaattaatattgcagctgttcttctgattaatgagagataattgctcatgaaaagtcacccctgtggcattttgttgtctcctggatctttgttcttttccactattattgaggactttcttgaagactaagcggttcttttcaatttttgggtattcagaaagggttgcctggttacagagaatggggaaatctcgggctatatcgggtaagatgtgccacagacagcaataccacaatgccactcagagaaaaggatggatacaagttaacgatgcgctttcaataaaacattcatagacttgttcacgctttgataatgacctcattaaacggagctgggggcaagtaagtcctgtctcctgtttgtgttcggctaacaaaacccagctttgagatcattcatcgctttggaaactaatatgaaatcaatgtaacaggagcaaataaatccgaggcaacccagccgactccccggctgcccagatctgcttgcagcttcagttggtaactggagaacgatagaggccaatgctaaaccaggggttgggggttggtggaggattggaggggggagtactttgaaggggatacagagggggtcgcaaagtgggagttatgcctgaaaataaaaacccagtggctaagcacatcaacaggtcagagcactggggcccgatgaaaaagccatgccactttgcccgtgaaaggaagttggaaaagaaagaagattgagaggggagtgtgaggtttgtgtcaggttccatcacaggcgctggggcaggcagggggtggggtgttactatcaaaccatttgaaaactagaatccaagtgttcaagtcttaaggctgagctggaaggaacccaacctcagagcccagtggcaggaaggcactgttgttctttttacagctgctttgatttttttcccccctaactggaaggcaggatgaagatgctctgtcttggaacagggaaaagcaattttgttacctttgcctttgtaacaccgtctcctactcaagggagacaatgctggcccctaccatcctcagcaaaaaagaaggaagcaaagggcttcccctccccttaaaagaactaattttctccttgaattatgaaagtaatggctaaggtaacagcctgtactctgtaccagactgcttaatgccgaataaatccttccacgtggctccccgagtcctggcaattagagctcattacaggctcataagagccctcattttagggcttacttaatggacgatgaaattttatcagacagaatcactgagaaataaaattgtgcgttggggcaagtgcagtggacatgtcttgccagtctactggcctgctcaagagaaagcccagcccgggggttctcttctgctccgagcagtttgcagtgctgcttcaggagcaaaggttgcaactctgcccaggctgtggagggtaggctggcttggtgagatggcagggggtggagctgacttttctggaaaaaaagggagggagaagacagatatagagggctgaggaaaagaaagagcagaggtgatagaggagatacacctccccccagatatttgtttttggtgggtctaagcaatcaatcaaggactttagtgaacaaatctctcagaaacagtccagccttcagcctcagtcaggcctgtcctgaagcatccccctgaaggcagccatcagcacccccttccctcccagcccccttcctctcaagatcccttgactgtggactttgaatgcatccacagtccaacataaaccaaataacatgtaagttgtctgactcggagcccctaatatgaatgggtttgtacaggagaaccatttccaaaacattaacagagcaattcttggaagcacaccagaagccacagagaatactgtcatgcaagtccccgaggactgtagataacctacctacccagagaaagaaagagtatacggctggcttctctgggcatcatcctattgaagccattgtgcaatataggccttaaacacatatcccgtgactggcaggagaaatagctcaactaaggacacttgttgctctctggaagaagacctgggtttggctcccagtacacatataatgactcacaaccaagttctagggggatctgatggcctctggcctctgaggacaccaggcacaaatgtgtgcacatccttgcatacaaacaagcacaaccctcctcacttaagtaaatctttcaacataaataataatctaccacaaggctatctccgtttttgagctccagtatcctttcacagtgttagaaaagacttgtaaagaatgcagaagctgcttgctcctctccagtggaaggagagagtaggttggtcggagctgggctggactatgtgggctggatgaaaaggaggagctttggaggctgtctaaggcaaaccttgcagtgcagaagtagttacaagtgagcggggaccccgtgctcagccccgagactccttaattgttgtcacaagatgttggattagcacatttctggaatagctgtctgtttacactcaggagacccaccgtccactaaccactttctaattgaattctaatcacattcaaatagctcaataaccagcctcagctgcaattcataaaactttaattgccatccataaatcctgggctccctagagtggggcatccctacaacccaattatacacttccagcaggcaagagaggggtggtcacagagatggaaaggggaaagaaagacaggacagacacagaaccctgagcctccaactgctgttccctgcccttgatcttcaagttaactgtcactgttgtaaactcacacttgaagttagccattttggtaaaaggacaggggagaaattgctgtcacctctgtggccttgactttctcccaaagacatctagatggcagccacctagcaggtaggtgcacaagtctttctgagccaccaaatggaggtctgctactaaactgctccttaggtacaggcaggattccaccactagctgaatggcggaataagcaaggatgcaataagcatctattgagaagggtggggtggtgttagcaggagatcacttagaccaagggaccgcaagggcctcctccagctgctaccccagtctctgcaaaatgttcctggtgaagtttagcggaggttgggcttggaaactatgtaactgcttgaaataagaaaggattgactctttgcagaaggcagagctgctggttagaaagatgcacaaggaaggattagtggtctgagtgacctcaagagaatacaaggacatttgagaattgatgtagcctggagtgcttggtttctaagctgggttgttacccgccagaccttggccaaatcgaaaagctggggagcaagggcagatatgaatgtggtgagcgttagaccggccgacctccactacaaggccacatacgctggtccagagcagaagtctcaagctttactgcgcagctagggttggctcctaggagcttaaatgcattggttatctcagtttaaatggcttggaggtccccacctggtgctctctgcagtgtgtcactgtgaagcgttggacagaggcccaagcgagggaggaaggtaggcagaaactggatcgctgagattttccgctgagagtgatggagggagaggaggtcgatccctagcaaaattaacagaccctacacttagcgaagtctccctctccccctcgttcttccctgcctccccccacccccacccctccgcttctgttgtgactcgggcagcctatcccgagggtggggagctgccgaggagtctgagctgagcggtactccgcagcatcacgtgccgcggtgggggctataaaatcctggagccggggctccgggcgggggacgtgaggaccaaccctctccagggacccctttgttcgagtcccagacacctcagcatccccaaggacttgaccgcccgcgtgcgcccagctttccggacagtgctcagatagcagaaggagagaaggggactcagcagcccgcaggacaagccatccatcgacatgtcgcgctccttctacgtggactcactcatcatcaaggactcctcacggcccgcaccctcgctgccggaatcgcacccagggccggatttcttcatcccgctgggcatgccgtccccgttggtgatgtcagtgtccgggcctggctgtccgtcccgcaaaagcggcgctttctgcgtgtgcccgctttgcgtcacctcgcacctgcactcctctcgcccgcccgcaggagctggtggcggagctacggggaccgcgggggctgcagtggcgggcggcggggtggctggaggcaccggcgctctacctttgctcaaaagccagttctctcccgctcctggggacgcgcagttttgcccacgggtgagccacgcacaccatcaccaccacccaccacagcatcatcatcaccatcaccagccccagcagcccggctcggctgcagcggcggccgcggcggcggcggcggcagctgcggcagcggcggctctgggacacccgcagcaccacgcacctgtctgcgccgccactacctacaacatgtcggacccacggagattccactgcctctccatgggtagggcggggtacctgcgtgcctccggggaaacaaactttgcgccaccagggaaggaggtgggagtaaggtgggatcttctgtggaactgttgagatcttcccctagaaattccacggaggtggaagttaaggagtcaacttcttggcgaggccttgtgcccttagctctacaggtgcacaagtgtcgcctgttatctgggctttggagacctggatcaagacttcagagaaataggaggttaaactgactgagacttggggtggatgcgtttggacctcagtgtggcatcttagcttccctgttggttaaaggctgtctgtgcctttggccgaggctgctagctggttagctttgctaggccaatggaagacagacaaggggaaggagaaggcagtaggtgcaagttccactggagtcttttaacttaaaatccaggacattaaaggccttaattctcatgaacgtctgtctttcttacactcccagacagaccagggacaaacatggatgtgttgggttagactgggttctggagccgcgttctttccaagggttgtcaagtagagtggggtcacttttttttttctgcggttcatcacctctctgctctcttttgggtccacaggaggctccgataccagccaggtacccaatggcaaaaggatgaggacagcgtttaccagcacgcagctcctggagctggagcgagaattctcttccaatatgtacctgtcccgactccggagaatcgagatcgcgacatacctaaacctgtcagagaagcaggtgaaaatctggtttcagaaccgtcgcgtgaagcacaagaaggaggggaaaggcgcttcgaggaacaatcacacaagctgcaagtgcgtgggtagccaggcgcattatgcgcgctccgaggacgaggactccttgtcccctgcctcggctaacgaagacaaggagatttcccccttgtaaaggcagaggctccttctgctacctgctcccggtaccctgccctcctcctccccatcagcacagggaccaaagttctagtccattgccctcattccacctggaaaagaaactctgaaaagtccggggaattcaatgccgggcccgactttgaagctagctcctctttatctgggattccactcagttacggattggttttttgtttgcttttttgttgtttttaatgtaaatatctagaattctaaccagtctcatatatcaggaaaaaccagggttgattaaagtttaacactgtatggggggaggggttggttgaagacgcatgccatttgcccccctgtcttttcagaacttgatgagaagaggggtttctttattgtttttgttgttgttttaaaatgaaatcattgaagttgccattaatatagagagttaaactccgtaggtcttgttttctgaaaattttcatgggggagaattttaaatccaggtctctggaagtccctttgtatgtgaatagttttatataaaatacatatttatatttatttaaataaatgaaacgaaataaatattttttaattcgtggtacttgtccttatccccccccccacacacacaccatatctagagacagtcatggaggagggacttaggggttaaatactgactgcaacttaatgtgggtcacttagctgatggaacttggaactaaaggttttgtgggtaacagaaacttcttaccaaaaagaccttcagtcctcatttgaggtgacccaccagctagtgagcctttcaaaaaccaggtgacagcccatttggcagaactgggaactaactgtaggaggaacactgaagaatactgagggaacctgatatgtagtagaggggaaatccaacatccacaatgtttccattttatttgtttgaaataggttcacactatgtagcccagggttgccttccactctcaggcattcacctgcctctgcgcacatgccaggcctacagccagttttcatttgcacttgatcttagcccccaaacccactatttatttgcctggtactttgtcctcctcccttctggtctctcaccttgctcagtgctaaaatctgaaccctgtgaagcaattcacaatctaggaatagtttttaggtcagggtgaggaaagttacaaatgacttctatacacgactagaaaccccgatgtgcttggtggcttctatacttcagagttagctgaatgtcctcagtgcccagattacaagaagctaggaacagagaagtgacttttctaaatatttacaatctcctatttccaaaacaacccaaaagatatcttagagtaatactgtcctctgggagcagactttgtttattatttctgctgttgtaagttggtctacttaacctctctgtgcccaggagttcatacctgctagcccatagcccttctctcagcaagaccacctgggataggtgtctcagtctggatctgtgtctgggagagaaggaaagaggaagagtggtttctgagtaccaacaatgcacactggtgggattcctgactatttatataaagatgtcacctaataggctcaagccacaaatagtgtttcacatcccctcccttccccctttccctaaagggatttttaggtctgatgttttagtccagtcctcctcagcaaaggagaaaggaaaggacatgaccgtggtgtttatgattggcagattttctgtgtcaggcacttccccaccccagacacacacacacagacacacacagagacagagagcgagagagcgagagagcgagagagcgagagagcgagagagagagagagagagagagagagagagagagagagagagagagagagaagagagagagagagagcactctcagaacttcaggaacaagattcattttcaaacccctttagggcaccaagctgaggcaggcaggaggaagggccacagtgtcctggccaaaggggacctgtgagctactttgtatggagggttgttcctgcttttgtactgttgtcccaagccaactcatgctccttcctggatctctgtgactctcacaccaggggaaggaggtaggggttgggagtgtcctactggctgggagatgacccagcttgctacatttcctatttcctaaaaaaaaaaatcagtctctctttttcctaagaaacagcagcaatggctagaggccagtgggaggaaagatgtttgcaggaactaggaatgggcttttaaagagggtcgcctcaatgtccactccagcccaagcaaagcctcttctgaggcatgggcagaccatcacctttctgtgcacatccttgccagtcccactgcccatccttgagtctggctccggtatggatctcagcccctagccttgcaaggtctaccaggttgcagactttgtggccagattgctgagtcacgtgcttgccactcccagcgttgtgcggagcctggctcccccgctggtgagaggagagctagctagggctgctgtccagactgtggactgctaagatgctgtcaatctctctctctagcttccatcttcaagaaaattcctaaggtcgttcttccagagacaaaaagattcttggccaaagatacttaagcagacctctgattaaaagaaagattctctaaaattctggaagaactctgcactttctgtcacttaagcaatggaacaccagttctatccaactaggatagatttgctaccctcttcatccgctaccctactctcactcagaaacccccccaaaaaaactcaccccagttaaaaaatttttcatgtttcaaaataacacttccagaatctagcatctgactgtccatattagattaagaaccttttagtcagctctcaaacactacaagacaagcacaaaaatagtctaccaataaccatcagatcaagatcaaacgttgtaagtcatgtccccttgggtgcactggagaaggtttaagacgttgggagccaagtggtcttggactttccatgtgtcccacttgtaacccaccacacgctctttatccagagcacagcccatcataatccttaaacacagccaggaaaagagagaggaaaacttgaagtagaaaccaggaacttttttttgaccaaaaaggtgtcagtgaggaccactgaaggtcttgtgtctaacctggagaactctagcagctgggagtttcaggataaagggaagatgaccagggcaccttatgccctggctcaaccaggacaggcaaggaggaatgtgaccctctgctctcccatccagtgaccaacacttgctctgggccaagtggctgatagggattgtatccccaggctcaattgcaatctctggcaaaaggaagccagcagctcattgaagtgtcagaggccccaggaatgaagacactggtgccagtagacctgtcttctctggagttctaattctgaactggtttagtttgaattatgcatcaaagccttatttcttgctatttctttttccaaatagaaacaaaactcagtgaagtacagttttccacttctggccttctcagcctctcccctcccccctgccactcgaggccacttctatccaattacatccgattaggattttgtccatttgcttaggtcacactgactggtcagacaattgccggaaaggtggtagggcaaagcaaaagtggtcacaagtggcaaagggagctctgtgtccacatatatgcagttatgcaggtatcatacatgtatgcttatgtgccagacacacacacacacacacacacacacacacacacacacacttatacacacggcagggtgggggagaattgagtagtcatggtgttgtaaatgaaaagtcaagaccaataaacagaatcctggggggttttagctttctttttcttttctttttaaaatagagcatccttagttcatgctgaccacaaactgtcattctgtcattgtagctaaggacaatctcttccctcatccaggtgctgacatcacctgggttatgcggtgctggggcaagaacccagagctttgtgctacctatgaccagcatcttaactaagctccaaacccagctctttaaaaacatgttttcatccttttttgcaggccctgctccttgagagatgcccttgaagatggctgggacttggggggaaagtctgaggtgagagggaggagaattctgggacaggagtgccagccagcccacccttaatgggagggagagaatgacacttgcaattgaacccatttgctagaggaaattgggtttaaaggagcaatcacttctttaaaaggagctcctcccatcttccccaaacagaaggctgtcccaggggatgaatgcgcactgtgcatcaaagcaattgttccaattttcattattcacagagaatctttgaatgtacctgttaaggtgacagaccttttaaaagggaacatttttccatgcaattaattggtgcatttactaggtttctattaacataatttaatataaatctattttataaatctttaggctcacattactgaaattgagctctttttagaaaaaaaaaagtgcccacagatgcctctttcttaaattagatagaatgaaatccgaaaacttgctattctaagacagctgcaaataagaaaggcaaagggagtcttttgtattgtctttgttaatgggggaggtttggagaaagcaggcgctcgtatcacaggagagattcaagcccagcctgagctctgtatctgaaacttgtaggacgagctgcatttgggccaggcagaagggggagaacttaaagctatgtcttaggaacagagttgaatgagtgctcagatgagagaaaaacaacagagaaaaaagaaacagcagcaatccaacttccgaagaaacctgaaagtaagtttcttctacctagaggaaggaaacccaaagccggtgaaacctcacagtccctaatgtctatgatagatatgtaaccctggctccttagaatcaggtgcattctccaaaattttggaggccccatcatgtctaaaaacagggttttgttcttctttggtctactgatgtcagtaagcccccttctccaccatgttttttgcttgtgtcccacctgagcactgttttcttgaacccaatcgtatctctgttgagctttcccagagccaaacacagaaagggggcaagggctcccctcggagaatctggacagatcggaagtgtatgctgtgtgcttaggaaagtaactagtttcagattaatgaagcagtgacaatttcaatctgcttgaaggcggaggttggcactgcccaggcccagcgtggggagctcgccaggcctggctttatattgtcctcatttctgaagagcagacaaagatggatagagagacattgaaaaggagggagagtatttaaaacagctccataaagcaagctgtcactttaagacaagaaccatggtgctttgatgactttgtattagcggcaccatttcaaataagggacttcagtctataaagaaagggagaaactgaaaggggaaagagggagaggaggnnnnnnnnnnnnnnnnnnnnnnnnnnnnnnnnnnnnnnnnnnnnnnnnnnnnnnnnnnnnnnnnnnnnnnnnnnnnnnnnnnnnnnnnnnnnnnnnnnnnnnnnnnnnnnnnnnnnnnnnnnnnnnnnnnnnnnnnnnnnnnnnnnnnnnnnnnnnnnnnnnnnnnnnnnnnnnnnnnnnnnnnnnnnnnnnnnnnnnnnnnnnnnnnnnnnnnnnnnnnnnnnnnnnnnnnnnnnnnnnnnnnnnnnnnnnnnnnnnnnnnnnnnnnnnnnnnnnnnnnnnnnnnnnnnnnnnnnnnnnnnnnnnnnnnnnnnnnnnnnnnnnnnnnnnnnnnnnnnnnnnnnnnnnnnnnnnnnnnnnnnnnnnnnnnnnnnnnnnnnnnnnnnnnagagagagagagagagagagactcttgcgcactgtagcgagactaattcctgggcagctacttgatttctgaagttctgggagaaacaagccacagcaggtgcagagacaggggtgggggaagacaggtggaagttgtcgcgatgggaaagagctccgggcccaagtgcagccggcgactcagagagcagcggccagcttggcctcagtttgctgagaagagcgagagagagcagcactgcccgccccgcaccgttggggattctaatggaaattttcgagagcttgctggaaaaagaataggaaggggggggggggcgggctgctttaagagaccaccttcacaaagcctaatttgaattatttggggtcaagcagcagcaagccacctcccctcttccttcctaattaatgaccatgattagttattaggcgtcttgaggcttcgaccaagctttgagtagtttattctaggagctggttttaacttgggagaagggagctggagttaggtttgttgttgttttaagaatggcttcattctgaggctcaggactgacctgaaattatcattgtagcccacgccagagtaatcctctgattacagagtgagtggtcgtcatcctgggggctgggttacactggaaggagggagtttagacagggcggtatgtctgtaggtctgcttctcttcctgtcttcatctcttccctcgtcttccatcctcctcttcctcctcctcttccttctcctcctccgtctgtatgtctctctgtctgactgtctctctgtgtctctgtcctgtctgtgtgtctctgtctctctgtgtttctgtccctatgtctttgtatctctctccctcccacttctcttcccccccttccttttctctctttctctctccactatttctctctccccctcccctccgttcctctctcttttcttcccattgaatccaccctggctttagctcaagtttcctaactggtaccccgtcttccaccgctggccctaaagcaaagacgcaggtgctgcggaccgcacttgagacggaggcctttggggaatcccgctaggtccccgggcgggcggtgggtggggcagtttcactgtctggattcttggatcgcaagttcctgggagtttcaatgttttttgtcgttgttttgtttctgccaaggaacttcatatatatatatacacactttctattttattttatcttgttttgttgttaagacttagaaaccgggacaggagaccgggtggcctttgaaggccggcgaaagggctcctccgtccgtggcgctggagggagacgcgtttagtcactgtttcattaggcactatttgaaccttgcaacatgtggtactttctgggcaagctgaaaagggaggattatgtaggagggacacaaggaaattagcgaacggttaatttaactcgttttctgctagacttttcgatacattcctaattgactgaggggcaggtgaagctcccgccccatgcaggctcattcacggtgggaataaatggctttttcaactcacactgctcacaatatatcatcaggggaaagacatgcaatgaatatgttgatttttttttattaatggaattacaccctgccatgcaggtgtgagggtaaaaaacctatactgaaatgaaataagattaacaatgaaattagaattttattagctttctatgtcacgtagacctggatttgaagtgtcaaaacaagcaacgagaaaagatagtctgtaggcagccctgccaatcaaccaagggaactgcttggtctctaactctggatcggcttccagttcctttggcatctcctctgggctgtaggtaggaggaggcaagtgctggagaactccgcctccagggaaatcctgggacccataggaagaactcttgggtttgaaaggctgggtctagaataagcgtaggggatgcttctagggcctagggtggcccgaggccgctccgaggtcagccgcgccctgctggcctccagcttcgcgtccttcagatcagctgctggggctggcagtgacccctgggaattgagagaaaagcccgaaggggagaatgaggggcgcgaggcccgcggggcgccccttggaaacggcgggcagttttgttatctcgggcccccggagcgtcagcgcagctacctgggtctggcaggcgcagaggtgccctatgcaaatgactcactattagaccagaaagaaacacttcaaatggccctttgtaaccttctatagaaaatcgaggtactctgcatgacaaagcacaattaagctttctattcaggagttctgcagctggtagcccattgggaaagtgggaggaaaccagaatatattaatagtgtggcaaaagttttttgtgtctgtgtccttttcggggttgggactggggaggggccatgggtggaccccgaggggaagaaggctccgccttggatccttgccacctgaacgacaacgcctctgcccacgtggaaagcccctcttgcctggagaccagtcttatgaatgatgtccacaactcccagagagctgagccgggtccggcaaatcccaagtgtgggatgggcaggacgcctgtcggtgcccagcctccaagtcctcagccagctccaccggtcccctgcctgagcaggaaccgggcgtctcaggcctggccagggcacctggacagagttggctggtgttgcgcaccagctcccacgaagatgctgaggagggacggttcacatcacacgtccccgttggttcattttgccaaccnnnnnnnnnnnnnnnnnnnnnnnnnnnnnnnnnnnnnnnnnnnnnnnnnnnnnnnnnnnnnnnnnnnnnnnnnnnnnnnnnnnnnnnnnnnnnnnnnnnnnnnnnnnnnnnnnnnnnnnnnnnnnnnnnnnnnnnnnnnnnnnnnnnnnnnnnnnnnnnnnnnnnnnnnnnnnnnnnnnnnnnnnnnnnnnnnnnnnnnnnnnnnnnnnnnnnnnnnnnnnnnnnnnnnnnnnnnnnnnnnnnnnnnnnnnnnnnnnnnnnnnnnnnnnnnnnnnnnnnnnnnnnnnnnnnnnnnnnnnnnnnnnnnnnnnnnnnnnnnnnnnnnnnnnnnnnnnnnnnnnnnnnnnnnnnnnnnnnnnnnnnnnnnnnnnnnnnnnnnnnnnnnnnnnnnnnnnnnnnnnnnnnnnnnnnnnnnnnnnnnnnnnnnnnnnnnnnnnnnnnnnnnnnnnnnnnnnnnnnnnnnnnnnnnnnnnnnnnnnnnnnnnnnnnnnnnnnnnnnnnnnnnnnnnnnnnnnnnnnnnnnnnnnnnnnnnnnnnnnnnnnnnnnnnnnnnnnnnnnnnnnnnnnnnnnnnnnnnnnnnnnnnnnnnnnnnnnnnnnnnnnnnnnnnnnnnnnnnnnnnnnnnnnnnnnnnnnnnnnnnnnnnnnnnnnnnnnnnnnnnnnnnnnnnnnnnnnnnnnnnnnnnnnnnnnnnnnnnnnnnnnnnnnnnnnnnnnnnnnnnnnnnnnnnnnnnnnnnnnnnnnnnnnnnnnnnnnnnnnnnnnnnnnnnnnnnnnnnnnnnnnnnnnnnnnnnnnnnnnnnnnnnnnnnnnnnnnnnnnnnnnnnnnnnnnnnnnnnnnnnnnnnnnnnnnnnnnnnnnnnnnnnnnnnnnnnnnnnnnnnnnnnnnnnnnnnnnnnnnnnnnnnnnnnnccccccagagaaatgtttgcttctaaataagtaagattcttagcctaacttagcattggctaaagtagattgtttacccatctagacccactcccaccccctcttcacttgttgggagtcctaagaccctaccttggtggattgcattgattttacgcagtaacttgtaacatcttgcaggcctttgccagctgcttccatccctactggaagaatgagtggcactcccagtgacccaacaacctgagagggcggggcgaggagtgcttattggaaatgttatgtctcagttgctgcttctctctagaaattctttctatcagagacctttcccaagactccagcttctaaccagattcccctctaaccttcagacaggggtggaaattcctccagcttctgctaatttgcgaatttctgcaaagagtccccttttcttctaaactgactgcactagggactgaactcagaggctccccatgggaaggtaaatgttctgccagtaggctgcattcccaggtctcctctccactttaaaccttaattaactactttgagacaaagcttctaaacctatgtagccaaaaatgaccttgaacttctgatcctctagcctccagttcatggcctcaaccatccattcataccctgttggagaacaaaccctggtccttgtgcatggtagggaagcactccactagctgagcaacgtctaccactcattttgctttaaaaatgtattgtccttgttttgttttgttttgttttgttttgttttgttttgttttgtttttgagacaatgtttctctgtgtagccctggctgtcctggaacttactctgtagagcaggctgg

SEQ ID NO: 973 - DNA, 1350 bp, Mus musculus
tgaggaccaaccctctccagggacccctttgttcgagtcccagacacctcagcatccccaaggacttgaccgcccgcgtgcgcccagctttccggacagtgctcagatagcagaaggagagaaggggactcagcagcccgcaggacaagccatccatcgacatgtcgcgctccttctacgtggactcactcatcatcaaggactcctcacggcccgcaccctcgctgccggaatcgcacccagggccggatttcttcatcccgctgggcatgccgtccccgttggtgatgagctggtggcggagctacggggaccgcgggggctgcagtggcgggcggcggggtggctggaggcaccggcgctctacctttgctcaaaagccagttctctcccgctcctggggacgcgcagttttgcccacgggaggctccgataccagccaggtacccaatggcaaaaggatgaggacagcgtttaccagcacgcagctcctggagctggagcgagaattctcttccaatatgtacctgtcccgactccggagaatcgagatcgcgacatacctaaacctgtcagagaagcaggtgaaaatctggtttcagaaccgtcgcgtgaagcacaagaaggaggggaaaggcgcttcgaggaacaatcacacaagctgcaagtgcgtgggtagccaggcgcattatgcgcgctccgaggacgaggactccttgtcccctgcctcggctaacgaagacaaggagatttcccccttgtaaaggcagaggctccttctgctacctgctcccggtaccctgccctcctcctccccatcagcacagggaccaaagttctagtccattgccctcattccacctggaaaagaaactctgaaaagtccggggaattcaatgccgggcccgactttgaagctagctcctctttatctgggattccactcagttacggattggttttttgtttgcttttttgttgtttttaatgtaaatatctagaattctaaccagtctcatatatcaggaaaaaccagggttgattaaagtttaacactgtatggggggaggggttggttgaagacgcatgccatttgcccccctgtcttttcagaacttgatgagaagaggggtttctttattgtttttgttgttgttttaaaatgaaatcattgaagttgccattaatatagagagttaaactccgtaggtcttgttttctgaaaattttcatgggggagaattttaaatccaggtctctggaagtccctttgtatgtgaatagttttatataaaatacatatttatatttatttaaataaatgaaacgaaataaatattttttaattcg

SEQ ID NO: 974 - protein, 223 aa, Mus musculus
EDQPSPGTPLFESQTPQHPQGLDRPRAPSFPDSAQIAEGEKGTQQPAGQAIHRHVLLRGLTHHQGLLTARTLAAGIAPRAGFLHPAGHAVPVGDELVAELRGPRGLQWRAAGWLEAPALYLCSKASSLPLLGTRSFAHGRLRYQPGTQWQKDEDSVYQHAAPGAGARILFQYVPVPTPENRDRDIPKPVREAGENLVSEPSREAQEGGERRFEEQSHKLQVRG

SEQ ID NO: 975 - DNA, 22475 bp, Homo sapiens
  misc_feature (1)...(22475): n = A,T,C or G
ttccaaaaccataaaaaatccaaaatcttcagacacatctggtcccaagcatttctaatgaaggatactcaatctgtataaattatacacaatttaattattttattttatatatatatattttttagatgaagttttgctctatggcccaggctgaagtgcagtggtgcaatctcggctcactgcaacctccacctctcaggttcaagaattctcctgtctcagcctcccaagtagctgcggctacaggcgtgtaccaccacgctggctaatttttgtatttttagtagagatggggtttcactatattggccaggctggtctcgaacttctagcctcaagtaatctgcctgcctcggcctgccaaagtgctaggattattgacatgagccaccacaaccggcctaatttaacctaaatccagaaataatcccttaaactttgtagctcacaaacgcatcctccctctttccccacaacattccatcagactcagggaacgtcatcacacatcaacgtcgtcatagtttgtatactgagtgctaagtatgtgcaaggcattgtgccaagggatgtcaggcttaactcacttaatgctcacaaccatcctgtgagaagagggtcattattatttccatggtcagagagaaggtggattcacatccaggacctcctaaacccaatcccaaactcagtggtgcagtgaaagggtgaggttgggttggagatgaaatggatttgcactgatttcaatgcatcgtcttattacgatcagtgtttgtctcataatctccatgcccctctgcttgaggacagaggcgacaaaacttgtgtatgactggcattttgcaagctggttacacattaataaaaggcccagtggaagttccaaaacaaatgagatctaagctatcttgttctcacggtttcccaagcccaagtagagcctggcatactataggcacaccatgggtgctccctgagtacatgaacataaagatgatccacaggtgggtgaacaatactgggggcaggtgaaagggaggacctcgaggcaatactgccagagcccctcctgcttagagtgtccaggcttctacatggggagacagcgcaccccccagacactcccgcccactcctttctggctcgctgagtgacgccagtttcaagcctcagcccacgccaggctccaggaccagcagagcgggtctgcgcggacagaggcactgggctgcgcccgtagcgcaccccaccaagaggaaggcgtgcctagtggggaggcggggctccaggggccgggcacacgcagacacactcctgctctctctacgcacgttctcacactctcattcacaccgcactcaccctgtgcacatccccagtttctcgtattcctcacattcacacattcatacactcatatattcacacacacccatgctcccaaacacgcttcactcacacagctccgcgcacagggatcaaagaccacattgggtacagtgtacactgcttgggtgatgggtgcaccaaaatctcagaaatcaccactaaagaacctatccatgtaacctaacaccacctgttcctcaaaaaactattgaaataatttaaaaataaaaaaggaaaagcaatctcattccctaccctcattctaattcacttttcacctcttcacacaccatcacgcccacgtaccttaatctcactgttgacagtacacttatgctcgcgctcatgcacactcgcccccacctcgccttcgctctttacacgagcttgcgcgcagacacactcaaggactccctacccacttacactcacgcatgcgcacaggcgcacacgctaactctgcctcctcactcgcgctcgtgcatgcgcatccgtcgcggagaggactttgtgcctggtgtgggagcgggtgtttggtggcctttgcggatgggcttgttttgaggctgtggggtcagtgcgatcgtttagatttccttggtttcccagtgagaaataagttagccaggaagagagagaggcggagacccagggagaccgagactggaggaagggagtaggttgaggttttagagccgtgggagcaagagcgccgggtaggagctgtcgcgcagagagcacctcgcgcagccccagagcctgtttgtttaccctgttcctcggagcggcttctccagcgtctcatttcttctgcctcccttgccctcgcccaggtgtgggacgcgggcgagtgaggacagacttacaaccgtcctcggccgcgcagcacagggttcccgcgccctgtccctatgccccggggacacagggcaggaggctgaaaaagggactcagcgttagaaactatggttggaattctccccctgccacttgctatgtggcctgggccagtttaccgttgtctcggagcctccgtttcctatctgaaataaggaatcattcattcaacaaatattaattgccatcctaatatatgtcacctctggtctggacatttggcatacactggtgaatacataaaacagacccagtttctgcccaggagcagtttgcagtcaacaagcatacggattgattatgaagagggcttttgaattaaataataaaatattgctttcatccactccaaatgtttttcagcgcttactgtgttctgggcacaggtgaataaaaacaatcatgttccctgtcctcattctaatttcagtccgtacattggactggccctcagaacctttaatatgtaggaaaaccaaccacactaaccaacaaatggacagccaacaaataaggaagtaataaaagcacctacctcacagggttgctgtgagaaataaaggaggcattaaagtcttcagccactgccaggcatatagtaggtgttcaataaatgctaggtgttatcaggtggttagtattgcttagtgcctaaaaggctctgccatcactagctgtgtgaccttggttcagtctttgaacttcagtagttcaaatagggttctccgcaaacataatgcggagaaaataatggcattttatctgggagggctgttgtgcggattaatgaggtcatgcaggcaaggctcttggttcaagaactgccacacagtgagagctcagaaaatgtacctacgagtattgtcatatactcgaaaggcgactgttttcctcctatgcaaagcaggtgggtgtgcagcaaagctgggaggtttctaatatcataggaacgttttgaaatttagggcgcagtcccaagtagggacggccaggacgccagagcctttgacgggggtggggagtggcgaggttaatgtaactgctgaacaaacatatgcccagaaaccgagggatagaaaggccccacactgggcgccttcagggtgcgagcgccaggctgtggaggagccttagagggcaacactcggccgggaaaaggcgcggggggacggagagatgattgtgcagcggcttcctggctcctagttgccaagcccagggactctgatacctaatttacaagcttcaagagcctatggagctgcaggtctcagataataataaaaccaacaagagaagccacgagccttaccaggcaccaggcccggtgttaggcagtcctgaattcctcacaaaaactcgaagacgatggcattttctctattttacagatgcagaaactgaaattctttctccactttcctaggcctcctttcagtttttgcaattaaccaagagaaactctcagaggctcccgtgagcacccttaggtggccgggaacgcattccccatccctctttcccaggccaacacccgcacatcttgcaggtctccgtttaaatgtcacttcaagcttcggttttatcatcacccagagccccttgagcttttctttcatattcacacgacctttttaactcaccagctccgagttaatttgttgattcgcttaacctggaaactccccgggggcgggtcttgtgctactgaattcccttgcgcgcagcctggggtataataggcgctcaatacacactttccaactatcaaatgaccagataaggctcaaaaaagttacgttgctctcttcagattccatggtaggagggcgtagggggcaggatttatcagttatttctcaactacatcagaaccgcatgcagaattctggttgacttctgtctccccctccatctacaccccgccgtgttccagcctcacatcattaaatcgaaatcccttaggtaatcagtatttttataaagctctccaggtgatttttgtagatgaccaagatcaaaaaccagaagggctgggctgctaaaaattataaagaattgctcttattttagtgacttttttttttttaagtctttgctcccataactaagcagctattttggctccaagctttcagaaaatttaggccaagggaagtggggaattggtatgcatgtgaataattcaaccctcctcttacacactcctgcctcccccgcccgccctccaatacaaaaaccacatctctgaatagggtagtaaaaaatagtaagtgccaggagaactggagagggagggagggaggtgaagcatttgcttcaattatccggataattgttccccacctcaggccattgttactgaaatgaaacaatattctattggatactgtcttggccttttcaggcctgctccctgcagtgcctagcacacgctgggcacagagtaggcgctcgataaattttattctgatgacagaggagagctctgagggtgggagagggatgccttgttcggcttgaggatttgggggtgggcgaatattaattaaagtgaagtggggagcagaggggctgtgtggcaggcattcagtgccatcacaacttttttccaactgggccgttcctgaaattctaagccaaacccctcacttatttctcagaagacctccactaccaccccccacccccctctccccgctgcttcttctcagagggccgaattgaactcttgcaactgtggtgagcacaaaggcgaattcaggtttctcaaaagcccatccgttctgaataaacaccagggagaagcaagattatttttggtggtgcatgaacacagggcccacagcctgccctccctctagaaaggccttccctggccttgcattaaaactaacaatattggggcagctgaaggaatagcctggctcctgagccccccatcactcaagcagtacaagaatgtggggactagctcccaactgccctctttcatcttgacccacagcttttcaagaggagcttgagttctctatgagtgtgtatttgctaattgcagccggggctttaatgagattcttttaactcccccaagctcgtttgcaggttatagccttatctggggacccacgttttccaccctggctacacatcctgtgaacaattgcctctccagagcctgaaaggagagcgagcgccccatttctgctgaatacacttctcagttcatccaaggctggcgggcttttgatggccacaatgcaagttacgcccaaagagtgtctctttggtcagatcgacaacgcttggcttcacgtttgcaagttaaacgggcagaaacccggctgaaactcccacgccagacgccagggacgtttccctccgccctgctcagagcaaaactggggaatgggtctgggcggggggaggaaagaaaggaggggtagttgtgagcagagggtgggggagaagagagtccttattctcaacagccatctagaagaagaaagggggggggcattttctctggcatttcttatttttattttttccattttgctttgttggcagctttacccaaacaaaaaataaaataaaatgagagcattttcttcttgtcttcacctaggtagctgctttcctccagcccctgaaaatgtgactccttcataaaatcaaaatttatgattattcaaatgttggggactgtgaaaagagaggaagaaagagagaaaattaatattgcagctgttcttctgattaatgagagataattgctcatgaaaagtcacccctgtggcattttgttgtctcctggatctttgttcttttccactattattgaggactttcttgaagactaagcggttcttttcaatttttgggtattcagaaagggttgcctggttacagagaatggggaaatctcgggctatatcgggtaagatgtgccacagacagcaatatcacaatgccactcggagaaaaggatggatacaagttaacgatgcactttcaataaaacattcatagacttgttcacgctttgataatgacctcattaaagggagctgggggcaagtaagtcctgtctcctgtttgtgttcggctaacaaaacccagctttgagatcattcatcgctttggaaactaatatgaaatcaatgtaagaggagcaaataaatccgaggcggccccgccaactccccggctgtcccgccctgcctgcagcctccatttggagctggagaaccatgtgggcaaatgctgaaactaagagaaaaaaggactggggatgaaagtggtggtgggggaggtggggaggtttggaggacacagagggaggggcaaagtgggagttacagcctgaaaaaaacagctaagcacaggaacgggtcagaactctggggcctgttgaataagcaatgctaagtccctgccctttacttgtcctgactttgcccatgaaagcaaacaggaagaaagagaagtgagacaggaatgtggggttcaggtcaggtgccattccagagctgggaagaagtactggagaccttttggaagctagaactgagaatccaaatctcagggttgggctgaaaggaaactgctcacccaggctcaacttggagaatcgagagacaagaaggccatgcctctgctgttctttctagaatagctttgattttttttttgtaagttgagggtaagggtggagtgccttggccaggaggaggtacaaagaacaattttgttaccatcacatatgtgacactgtcttgcactcaaggaagacaaaaccatactctattgtcccaagcaagagggagataataaaaagatttcccctttcctttaaaagaactaattttctccttgaattatgaaagtaatggcttaggtaacagcctgtactctgtacccgactgcttaatacagaataaatccttccacgtggctcctggagttgtggcaattagagctcattataggctcataagagctctcattttgggggattacttaatggacgatgaaattttatcggacagaatcactgagaaataaaattgtgtggcggctcagacaccatgggcacacgccaatggtctgtctgttccctctcaggaaaagaaagctgaacttggggtctcctgctggttcagggcactgcactctggggaacagtagggctgggcagggctggggtggggggtgggcagtgctgccccgggggcatggagggtaggcttcctttgaggaggggataggcaggtagggccagataggggctggactcagaagagaaggagggagagagactggcagacactgagagatccaaagagaactagagaagtgagtcagagtggacagaaactgtgcaagaaatgggattccagtatacttgctcttggtgggctgaaggaattaaccaagtaccctaagggtcaagtttttcagacatggtcttgctttcagcctcagcctggtctgaaaccactgctccccttgaagtctttaggaaaccccatgagcccctcacatttctcaaaactccttggcactgaaaaatgaaagtttccacagtcagacacaaattgaataagatgcacaagcctccttgcatagttaagattctctaaggtaaaatggtctgcacatgggtgcgatttctaggactttagcataggagctcttcctctgaacacatcccaaactgctgggaacattgtgactcaaaccatcagcccaaaacagactgtggataacctgggacctaacccagaggaggaaaagagagaaagctannnnnnnnnnnnnnnnnnnnccagaggaggaaaagagagaaagctattattcttaaagagtatctgtatctatatctatatatgcttgtatagttgcaaagtgaatggggggaatcgagtcatctatttggacagtttaggactgtaaaaaatatcctgccattcagcagggtatgttttttattgccattctccatcagtggctccaagccttcttcttggggctgaaatgatttcggggattgcctagatcctccagtcatgaacaagggcgggctggggtgagcctgagcgtctgcagaccttgtggtacaaaagtagttacagctgagctgccccatgttaagccctgagactccttaattgttgtcacaagatgttggattagcacatttctggaatagctgtctgtttacactccagagacccaccgtccactaaccgctttctaattgaattctaatcacattcaaatagctcaataaccagcctcagctgcaattcataaaactttaattgccatccataaatcctgggctccccagagccgggcatccctacaacccaattacacttctctagcaggcaagagagactgtcacagagatggagaggggaagacagaggatggaaagatagagccgtgcctctagctagtgctctcctggatttgggcaccttgttctctcaggtggagggagtcctgtctctaagtttcttagcaccatcatgaactcaggattgaagttagctgctctggaaaaaggatcagacttctaactattgcccaaccacatggccccagcccgcttttctgcagggggaaatgaagagagaaaatggccacctctgctgccttgccttctccgaagataaatagtcccaatagtttggcagccaccctctctcgggcagtaaggggtgtgcaagacttccatggaccagagagagttcccttacaaagccacttctgccaatcagaggcaagattccctggatggctgaatcctcttcatcctttttaggttcttaagatgcagaggaaagagtgcttcctggttagccttgctaagctgcccatgattggtaaaaatgagggacaggaaatcctcagacccagagcgaaggtctatctaatccctgctgcgtctttaggagggcttggtgtttgaggtcctccctccaaaatcttcaggatggagtttgtaggattgccctggaatgccatggtgttactacttggagaaagaaaagggtgactcttcaacatctctctctctctgcggaagtgggaggtgccgatcagaaagggaaacaaggaagggtcgttggtctgagtggccccaggagggccccaagtacaaagacacttcagaccttgtcgaacatcagcatgaaaagcttgacggtttcttagctgggaggcctcacagttctgcgccggacagtcctgaactaaccacctgaatgacctctgccaagtccaaaagctgtggacaggggtaggtgtaaccgtggccagagctgcgctcagggactggacgactgccagtccgtcgcccgcacaatcctgctccaaaccgcaggcctcacacttcaccgcgccgcagccacccctaccacagaggagctggaaacactgagcattcctattaaataagcctccaagtccccacctggtacgctttgcggtggggcgtggggaagagttgggctgcggccagggtagcgagagggggtgggatggaggatgcagcgctgtgatttctcagtaaagcgtggagaaagagggggaggaggccggcctcccccgggaaattaacaaaacctacactttgcaaagtctcccccatccccctcccccgagttcttccccgccgcgcgcccgcccctcctcgcggcttctgttgtgactcgggcagcctatcccgagggtgcggagctgccgaggagcctgagccgagcggtactccgcagcatcacgtgccagggtggggggctataaaatacccgagccggggcgccgggcgggggacgtgaggaccagccctctccggggacccctttgttcccagcccagacgccaacacctctgcgtccccaagggcttgactgcccgtgtctgcgcggctcccagggcagagcttagaacactagaggagaggggtcgccgcgaactgccggggcttccagccacccacccctctcgacatgtcgcgctccttctatgtcgactcgctcatcatcaaggacacctcacggcctgcgccctcgctgcctgaaccgcaccccgggccggatttcttcatcccgcttggcatgccgcccccattggtgatgtccgtgtccggccccggctgcccgtcccgcaagagcggcgcgttctgcgtgtgccctctctgcgtcacttcgcacctgcactcctctcgggggtctgtgggcgccggcagcgggggcgcaggggccggggttaccggggccggaggcagtggggtggcaggggccgcaggggcactgcctctgcttaagagccagttctcttcggctcctggggacgcgcagttttgcccgcgggtgaaccatgcgcatcatcaccaccacccgccgcagcaccaccatcaccatcatcagccccagcagcctggctcggccgcggcggcggcagcagcagcagcggcggcggcggccgcggcggccttggggcacccgcagcaccacgcacctgtctgcaccgccaccacctacaacgtggcggacccgcggagattccactgcctcaccatgggtagggcggggtcttggggcacctgcgctccgcgcctttcgcgctcctggagcaaactttccacctccagtggaggaagtgggagcccggggacagggtgaagagagaggacgggcttttagtgtaaccgtagagtcagccacagaagttccacgaaagtggaagttagtttgccagcttctccactcagcctggtgcgttttactcctagtagtaggtgctcgagtattgccttattaatactggggccttagggacctcgaacgtcacggcggagaaaccagaggttaactgcttgggatttggggtgggtgtgtttgaacctgtgtggcatccccgcgtcggggcggctaaagcgtcttgacgtttttggctaagcctgcgcgcttctccgcttggctcaaagggaggcgatcagatagtgcaagcccccatccctctttaatcctgtgacttcgcatcctgcgcatcgaagacctttatttgctttgcacgtctcttttcttccccgctaagcaaccacgtgccttgaaatgggaaagggatacagatgttcggctgggcttccccgggtgggtccctgaaatgcgtcctggttagcacatggggtgggagcaccttgcacgagccttacctctctaccctctcttcgccggtccgcaggaggctctgacgccagccaggtacccaatggcaagaggatgaggacggcgttcactagcacgcaactcctggagctggagagagaattctcttccaacatgtacctgtctcgactccggaggattgaaatcgccacttacctgaacctgtcggagaagcaggtgaaaatctggtttcagaaccgccgagtgaagcacaagaaggaggggaagggcacgcagaggaacagtcacgcgggctgcaagtgcgtcgggagccaggtgcactacgcgcgctccgaggatgaggactccctgtcgccggcctcagccaacgatgacaaggagatttcccccttatgagggagggcctcctccctcacatcccccgctcctggcagaccaggcaacgccaaggcgtggggcacccaggggccagaatccttgctcattgcagtggtcccatctggagaagaaacgaacctggaagttctggaatggacaagccgggacctgacccttcgcgtctccttcttgacctgtttatctaggactccaacttgaagttacagatttttttaaaaaatgtaaataacctataattcaactcattcttgtcgtataacagaggaaaaacagggttggtttaagtttaacactgtatggggtttttgaaagcacatgtcagttccccatccctactctctttcagaactcgataagaacacaggatttattgattattttctgttgtcgttttcaaacaaaaacacccaagttgaaaataatttagaaaattagaccttgtaggtcttgctttctgaaatttcgcctggggagaatttaaaatctaagtcgctggaagtccctttgtatgtgaataggtttatataaaatttatatttatatttatttaaataaatgaaacaaaaaccagaattttaaatctgtggtgtttgctctccctatcttctcctgccccctcctccaatgtctagagaaaggcatatgcaggaaaaagctgtctgaggaattcgaggaaaatgttgagtaagaacttggtaatgtgggtctcttgactgagggagtttgtggctcaatgggttttctatgtaacagaactttcgccaaggagacacctttagtcatgatggcatctaccaggcagtgcctctccatccttaaaataggcaacctcctcacagttgataggacaaatcactccatttggaatgacactgaccattaacgacaggtaaacctttatttagcaaggaagggtaaaaatcccccatctagtttttgttttcttctttctacttcctcatttctctcagtacgaaaacttgaattatgtgaaggaatttgtagagtcagaatagttttaggaagagcaacaatccatcaaacaggtcagaagcaaacagtggaaacttaataacgatgctacaagcagaattagcgggtttccctcaatgttaagaaaacaaaaagtcagggacaggaagtattctgttcaaagatttataatctcactttttcaaagcagcccagagatgcctttagagctttgagttttggggctttttttcccggtcaccctaatattcagttaatttggctcccttctagtcccttccagcccaccccccttcccatagcctagcagaatcacttcctttaagcctggtcccagagaagacttatttctagctcttccctcagcagggcaactggctctctcctcagtgcggcctgggcttgttatcttagggagagaagtgaagaaactggaaacaggaaaacgaagagatctcattccctgcaagctgagccccactaatcctcaaccggtgtgatttctgattaggttctataaagacgccacccaataggttcaagccacaggagttaatgacaacacacatacacaagggctttaggtctgagttactagaggccggtcggactgaacctcaccaggtacggctggggttctaaaactggacacggttttccctgagtgttgtctttagcgcgcgcgcgcgcgcacacacacacacacacacacacacacacacacacacacacagtaggctcagaaggaaaatccctcttcgttccgtcaagggacatagggaggagggcccgcactgtgtgaggctgaaaagggagctgccggcgctttgtgcaatgtgctgagctctgtcctgcgcagaggtcccagacagccggctcactactgcctggcctgggaagctcaggcctctggatctctttcctcctgtctctcacgcgcagagctccgggctcttcgccctgcccgccacgaaagggaggaggcgcaggccggctgcctttccaaaagattctgtctcccttcttcccaagaagcaggcctctccgcgcgcgagaacagaggtgggaggacgggagtttgcaggcgcaaagaacaggagtttaagcagactatttccaccaggggaaataagaagcacaaagagcgcctgctgcagctctttgcgctcttgcccaaagctaagcttcctctgggctgtggggagactcctctggtccccgttccatctacccagcccggcccctctggggctcagcgcttgggtttagccctcccctatgtccatgactagccccgatcacagtctcttaagcctctcccggcccccggctcccaggccctgcggagccaagcacttggaacaccaggtaccgcgcgcggtggacccagctctgccatgccgcagatagccgcagtgccaaccctgtttagatggtttggatctgcttggatggccccagcccctcttgcttcgatctttggggaagttccctagggaaaggagaataaacaaagtatttctgcccagaggcaaaaaaaaaaaaaaaaaaaaaaaaaaaaaggcgtagcgatacctatttagatgttgggacactctccatagaagaaaaggttctccagggttcccagggaggtcttccttctaggacatccgatgcaaagtggactcctttggtcactttcagaatggagtatgaggtctcctactatgctagaataagttttacatgtttccctatccccactcctcaaaaaatatcagttgatgtttttgaagttttcaaatcggaataatgctttggtattttggagtcggtctgattctaaagaccaacagtttcactttagtttaagagcatttaagccaaccctcagaaactcacattctcagctaaataatcttgatatcaaacacccatttaagaggaaagtttaagatgtatggggtcacccttgacaatttctctacctgggaagcactagatactagtttccattatgccccacttgaaaaacagaaacagaactatgttcccccagagcatgacctcttagagaggtcatggaaagaaagaaagaatggaaagaaagagaatgaaaatgagaatgagaattagaaagcaggaacttgctccaccaagagaaaatcagtgggtagcacccgctgtgagtgtggttgagtccatctttttgagaacaagtctcatgttagttttaaacaggaaaagagctgggggtggaaggcagagtggagagcaggaaggatgacctctcacccatgtgccctggcccagcccagacattcagagcatagaggaggaacagagacttttccccttcactctcccactcagccaccaacaaatgcctaaggccaagggcctgatactgatagcaaactaggccaaaagcaaaagtgacccagtagcccatccttagggtgtcagtgggcctgcatgatggagacactggtgcccatagacctcttttcctctagggtccttattctgaagtggtcatcatagctcagtcccttccccactcccctaaagaatatctaataattttaggagagacaaaacacttggggatgtgaagtctttgatttctgacctccgcctccgtctcctcattgccaaccaccaccccgctaacccacaacgccccaccagttctgtccagttatatctggtcaggattagaaatgcagtttgcttggcacactctaactgtggtcagacaattgccagaaaggtggtggttctaactaaaagcagtcacagagggcaacaggggctttgtatgtacatgtgtgtagtgtgtgcatgcatgaggcacatgtgtgtgtgaaagagacagagagggtcctttgatggtggtgatgtaggtggaaaagagtaatttttaaccaggttttctttttctttttgtttcccacttatacctttcctgcaggttccactcgcttttaatggcactccttgagagatttctttgagggagatggggaggtgctcagtgttgggttgtggggaggaaaaacagtctgaacatggaggggagacatggagaagagctctggggcatgatctcaagcccagccttacgggtgtgagagaggggaggagaatgacactccaatagaacctatttgctagaggaaatcaagtttaaaggagcaatcactcctttcaaaagagctcctcccatcttctccaaacacagcccaaagctgtcctagacgatgaatgcagttcagtgcatcaaagcaattgttcctattttcattattcacaggaaatctttgaatgtacctgttaaggtgacagaccttttaaaagggaacatttttttccatgcaattaaatggtgcatttactaggcgtctattaacataatttaatataaatctattttataaatctttaggctcacattactgaaaattgagcttctcttaaaaaatgcccacatctcttccctaaactacatagaatagaacccaaaaacttgctattctaagccagctagaaatattaaaagtaatagaatcctttgtattgtcttttgttaatggtgggggtatgaagaaaaggggcaacttgtctcatagaaattctataaggacccgaggcttctacatccaacatctggcacttggagtgggcaacacaggctggaactaagggaggggccaaagaagcacagaacttaagacatctcttagaatcagacttgaatcagaactcagattaaaaaaaaaaaaaactaaaaaaaaagaaagtcagcaaaactccaacttgcaaagaaatttggattccagtttcttctgtttggggaaaaaaattctgaggcctgtgagacctctagtgctgctccatgtggcaatagataaccttgtctgttgccatagccagactacttattctcaagtgtaccctccaaaatcctgggcatcccattgtctctgaaaatagtgttttgtgctctcttaatatactgatgtcaatgccgcccttcggtactggacactgcttttcttcaagctgagccctatgttttcctgaacccttgctgtatctttgttgagccttctaaatcccaaacctaggaaggccccaggggctcccctgagtgaatcctaacagatcggaagtgtatgctgtgtgcttaggaaagtaactagtttcagattaatgaagcagtgacaatttcaatctgcttaaaggcggaggttggcactgcccaggcctgagcgtggggagctcgccaggctgggctttatattgtccccttttctgaagagcagacaaagatggatagagagacattgaaaagcaaggggagtatttcaaacagtctcataaagcaggctgtcactttaagacaagaaccatagtgctttgatgactttgtattagctgcaccatttcaaataggggactcaagtctctagtgagagggaggcaaggggagagaggagagagaagcagagagagagagagagagagagagagagagagagagagagagagagaatgtagtaatatttagcctgtgagcactgtggcgaaagtaattctaggcaactacttggtttctgaagttcaaggagaaaccacccacagcaggtgcagagaaaaaaaggcaggtgggagttgctcccgatgggaaagagctccctgcctatgagtggcagccggctccaaggagcagaagccagcttggtctcagtttgctgcgaagggatggagcagggtgagaagctctgcctgccccagaccttgaaggattataatggaaatttttgagagtgtgaaaaagaaagaatacgaaggagagggagtgcatgcttttggagacttccttcacaaaccctaatttagattgtttggggtcaagcagcagccagccaccttcctcctttcctccttaattaattaataagaatgattaattattaggattttgaatgtcaaggcttcaaaatgcctttggctagaggctgatgagttgcttaagccatacatgtagttttaacttgggataagggagttgagactttagaggtgtgtttgctgtcactctgtctttttttttttttttttttttttgcctttgcatctgcttccccagtgatctttctctgtctgcatttctctgtcttgtctccatctccttctgccttgatatccgcccccacccccaccctttgttctcctggccgttttccccatccagtctcccctggccatggctcaatcctcctagctctccggggaaagaggaggatgctaaagctgccattcctacttgggtatctactgcgggcacaggcatctcggaatcccactgcatcatcggtggcaggaagtgggtgggcattaatgtagtttcactcgctggatcgagagttattgacagcttagattttcttttttctgcttgtcaaaaatttctttctctttcttttcttctctttttttctttttttttttcttggatacgggaaccagaaccacgaaatcctgcaagctttgaaggccggcgaaagggctcccccgtcggtggcgccggagggagaagcgtttagtcactgtttcattaggcactatttgaaccttgcaacatgtggtaatttctggggcaagctgaaaaggggggattatgtaggagggacataaggaaattagccaacggttaatttaactcgttttctgctagacttttcgatacattcctaattgactgaggggcaggtgaagctcccgccccatgcaggctcattcacggtgggaataaatggctctttctcaactcacactgctcacaatatatcatcagggaaaagacatgcaatgaatatgttgattttttttattaatggaattacaccctgccatgcaggtgtgagggtaaaaacctatactgcaatgaaataagattaacaatgaaattagaattttattagctttatatgtcacacagacctggatttgaactgtcaaaacaagcaacaagaaaagatattctgaacgcagccctgtcaatcaaccaggagaaacgaacagcgtggtatcgaaatcataatcaccttccagttcttcagcgcctcacttgggccttacgtgagaagcaagtgggtggaggaccccgcgtgggcaaaggcctggtctctggacctgcagatagtagatgaaaaacaccacctgggttcggtagacccggcctaaaaaaggctcgggtccaggctagaagggcctggatggcccgaggcctccaagatatcagacggaccggctgggcacccgcggcctgcaggccatatttcgcgtcctccaaatcagctgcctagggcgggccgtgacccgagggaattggagagaaaagtccaaacgctgggcgagaggcggggtagggcgccctttggaaaccgccctgggttttgttactccggggcccccggagcttcggcacagctacctgggtctggcaggcgcagaggtgccgtatgcaaatggttcactattaggcgagaaagaaatacttcaaatggccctttgtaaccttctatagaaaatcgaggtactctgcatgacaaagcacaattaagctttctattcaggagttctgcagctggtagcccattgggaaagtgggaggaaacgcgaatatattaatagtgtggcgaaagttttttgtgtgcgtgtccttttctaggtcgggggtggggaggggcggtgggtggacgcagagggaggaaggctcagccttggatccttgccacctgaacaacgtcgcctctgcccacgtggaaagcctcgcttgtctggcagccggggttctgaatggttgccgcgacccctgcgctcccagcagggccaagaggacctcgcgggcaccagcgtccgggcgggaagggacgtgtgcccaagcctcgcctcctggccctcagtgggctgggacgcccttgatcaccggcgcaggaaagaggctccccagcccgtgagcttcgtccgggcgccagggcagggatggctggtggtgtgcactggagagcacgacggtgacgctgcgtgggaaagagacgtgggaagggcatagccggattatccactcagctccaattttctccaagcgccactcaccccacagttgaggttcgcttcccgattgttcatttgtagagtctaaagggaaagaaaattttgcctctgaataaataaagggcccttaaaaccaactctgctgattatcctgcgttttccatctggatccatttcaccctcttctgccctgctgggtgccctcggacactgacctttgtggacagtattagttcctttatcaactgcgtcgctggcaggcgcttgcctctggcttccatttgcatttggtgaataagtggcactgcaaataaccgaacaacctaaggatagagaactgcaggtatattgtttctgggaatgttatattgttccagttctggcagttgctgcttctctagaaattctttttctctttgagagcctattttcctaggctctggcttttaatcagactccccctgtgccttcaggcatgaagtggaaatgccttctagtttctgctagtcccctgggtgcatcaaaattcttgttagttccattagccctacacacatctctgcaaatagtcgctttgttgaaaagtgtctttaaaaaccctagctcacattggttacctggctcctgatcagccatgttatgtttaagtcaatcccttctataacagccagctcaactgtcaccatacttttgctgggacaactcctgtgagaggaactccaccctctaacccatttcattttcagacagctttgaccattagaaactttcttgtgttggattagaatcttcattcagtattttttatccattgggtcctacctagttctttctccatggaacttctaagtgtctgtcttctccctattcccaactgtgaggacattgatgacagcaactgcatctttcatctctatatccttagcattcatcacaacgcctagcacctactagcagatgcccagtaaatgctagctgggtcagtgcatcatcttacttccaagtctctaccagttgcatcaatcatggaggacttagaaacagctatgatgaaatatagcttgaagatgggatatatctataggtgtgtgtatacacatgataaatatatgtaaatgtttatataggctaaatatcatgtacataaggtaaatatattgagaagtttctggagacaatctacgtgctttaccatttactagcagtgtgacctcgggcaattcacttcatccctctgacttccacttgcctcatttgtaaaataaggataattaatagttgagaattaaataaggacattgatagttaaataaggaaatagatgtgaagatatatagctatttagataaagtagccatggaaggtctaactgaaaaagtaacttttgaatagagacctaaagagaatgtggagaactgatcacatggcttgctggagcaagagaattccagacagaggtagaaacaagtgcaaagacgtagatgggaacatgcctgcaaataaaaaatatgtgggtaaatataaaagatgtttttaaaagatctcttttaaagataattgaatattttaaagcaaaaatagtaatatattgtggagtttataacatacagtttttttgttggtttttttttttttactttttaaaaaaaaattagagatggggtttcactatgttgcccaggctgattttgaactcctggactcaggcagtcatcccacctcatcctcccaaaatgctgggattacaggtgtgagccactgtgtctgtctcagctgattctttttagtcatgatagttatgctctgtaaagttgttgaaaatgatgaattagtgaacactgaacattgttcacaggggaaatacagagttagattctgtaaacctctggttgcaacacttttgtcaagcaatcaacacataaccttgttttatgtgtgtctctatttaaagacagcttatgtaatatatatcattgatttattaacatggagctcacagccaacatgtctgaacaaagctcatctaacacacacataaggcacatccatgtcttctcgtactaggaataccagatataattttacaattgcccctgggagccatttttttatggtgaaaaatatatatggcataaaatttactattttaattatttttcagtgtacaattcagtgccattaagcatttttatattattctgcaaccaccaccaccaccattacccatctctagaacgttttcatcttctcaaatgaaacctccatacccattaaacaataactcccctgtcctgtgccttctgccctgacaaccaccattctactttttgtctctatgaatttgagtactctaggtacctcattgttctgtgaaagggctgtatatgcaaagagatccccaaataccaaagaagtgaagaaatcaaagaaggaagcagacaaatccagtttgttggtatgagattatttatcaggggaatt

SEQ ID NO: 976 - DNA, 1812 bp, Homo sapiens
cggcttctgttgtgactcgggcagcctatcccgagggtgcggagctgccgaggagcctgagccgagcggtactccgcagcatcacgtgccagggtggggggctataaaatacccgagccggggcgccgggcgggggacgtgaggaccagccctctccggggacccctttgttcccagcccagacgccaacacctctgcgtccccaagggcttgactgcccgtgtctgcgcggctcccagggcagagcttagaacactagaggagaggggtcgccgcgaactgccggggcttccagccacccacccctctcgacatgtcgcgctccttctatgtcgactcgctcatcatcaaggacacctcacggcctgcgccctcgctgcctgaaccgcaccccgggccggatttcttcatcccgcttggcatgccgcccccattggtgatgtccgtgtccggccccggctgcccgtcccgcaagagcggcgcgttctgcgtgtgccctctctgcgtcacttcgcacctgcactcctctcgggggtctgtgggcgccggcagcgggggcgcaggggccggggttaccggggccggaggcagtggggtggcaggggccgcaggggcactgcctctgcttaagagccagttctcttcggctcctggggacgcgcagttttgcccgcgggtgaaccatgcgcatcatcaccaccacccgccgcagcaccaccatcaccatcatcagccccagcagcctggctcggccgcggcggcggcagcagcagcagcggcggcggcggccgcggcggccttggggcacccgcagcaccacgcacctgtctgcaccgccaccacctacaacgtggcggacccgcggagattccactgcctcaccatgggaggctctgacgccagccaggtacccaatggcaagaggatgaggacggcgttcactagcacgcaactcctggagctggagagagaattctcttccaacatgtacctgtctcgactccggaggattgaaatcgccacttacctgaacctgtcggagaagcaggtgaaaatctggtttcagaaccgccgagtgaagcacaagaaggaggggaagggcacgcagaggaacagtcacgcgggctgcaagtgcgtcgggagccaggtgcactacgcgcgctccgaggatgaggactccctgtcgccggcctcagccaacgatgacaaggagatttcccccttatgagggagggcctcctccctcacatcccccgctcctggcagaccaggcaacgccaaggcgtggggcacccaggggccagaatccttgctcattgcagtggtcccatctggagaagaaacgaacctggaagttctggaatggacaagccgggacctgacccttcgcgtctccttcttgacctgtttatctaggactccaacttgaagttacagatttttttaaaaaatgtaaataacctataattcaactcattcttgtcgtataacagaggaaaaacagggttggtttaagtttaacactgtatggggtttttgaaagcacatgtcagttccccatccctactctctttcagaactcgataagaacacaggatttattgattattttctgttgtcgttttcaaacaaaaacacccaagttgaaaataatttagaaaattagaccttgtaggtcttgctttctgaaatttcgcctggggagaatttaaaatctaagtcgctggaagtccctttgtatgtgaataggtttatataaaatttatatttatatttatttaaataaatgaaacaaaaaccagaattttaaat

SEQ ID NO: 977 - protein, 322 aa, Homo sapiens
RRGVAANCRGFQPPTPLDMSRSFYVDSLIIKDTSRPAPSLPEPHPGPDFFIPLGMPPPLVMSVSGPGCPSRKSGAFCVCPLCVTSHLHSSRGSVGAGSGGAGAGVTGAGGSGVAGAAGALPLLKSQFSSAPGDAQFCPRVNHAHHHHHPPQHHHHHHQPQQPGSAAAAAAAAAAAAAAAALGHPQHHAPVCTATTYNVADPRRFHCLTMGGSDASQVPNGKRMRTAFTSTQLLELEREFSSNMYLSRLRRIEIATYLNLSEKQVKIWFQNRRVKHKKEGKGTQRNSHAGCKCVGSQVHYARSEDEDSLSPASANDDKEISPL

SEQ ID NO: 978 - DNA, 1278 bp, Homo sapiens
cagtggcggcggcggcggcggctcggcaggcgggttcaggcttcgggggccagccgccgccatgatcctgctggaggtgaacaaccgcatcatcgaggagacgctcgcgctcaagttcgagaacgcggccgccggaaacaaaccggaagcagtagaagtaacatttgcaggtgaatgaactcagaggaatacaaccaccctttctacaacaagagtcctcgacaagatgatcttggaagacttttgcagctctgaagtgctgttacctggagatttcgatggggtcctctatcatatttcaaatcctaatggagacaaaacaaaagtgatggtcagtatttctttgaaattctacaaggaacttcaggcacatggtgctgatgagttattaaagagggtgtacgggagtttcttggtaaatccagaatcaggatacaatgtctctttgctatatgaccttgaaaatcttccggcatccaaggattccattgtgcatcaagctggcatgttgaagcgaaattgttttgcctctgtctttgaaaaatacttccaattccaagaagagggcaaggaaggagagaacagggcagttatccattatagggatgatgagaccatgtatgttgagtctaaaaaggacagagtcacagtagtcttcagcacagtgtttaaggatgacgacgatgtggtcattggaaaggtgttcatgcaggagttcaaagaaggacgcagagccagccacacagccccacaggtcctctttagccacagggaacctcctctggagctgaaagacacagacgccgctgtgggtgacaacattggctacattacctttgtgctgttccctcgtcacaccaatgccagtgctcgagacaacaccatcaacctgatccacacgttccgggactacctgcactaccacatcaagtgctctaaggcctatattcacacacgtatgcgggcgaaaacgtctgacttcctcaaggtgctgaaccgcgcacgcccagatgccgagaaaaaagaaatgaaaacaatcacggggaagacgttttcatcccgctaatcttgggaataagaggaggaagcggctggcaactgaaggctggaacacttgctactggataatcgtagcttttaatgttgcgcctcttcaggttcttaagggattctccgttttggttccattttgtacacgtttggaaaataatctgcagaaacgagctgtgcttgcaaagacttcatagttcccaagaattaaaaaaaaaaaaaaaagaa

SEQ ID NO: 979 - protein, 275 aa, Homo sapiens
MIDFCSSEVLLPGDFDGVLYHNPNGDKTKVMVSISLKFYKELQAHGADELLKRVYGSFLVNPESGYNVSLLYDLENLPASKDSIVHQAGMLKRNCFASVFEKYFQFQEEGKEGENRAVIHYRDDETMYVESKKDRVTVVFSTVFKDDDDVVIGKVFMQEFKEGRRASHTAPQVLFSHREPPLELKDTDAAVGDNIGYITFVLFPRHTNASARDNTINLIHTFRDYLHYHIKCSKAYIHTRMRAKTSDFLKVLNRARPDAEKKEMKTITGKTFSSR

SEQ ID NO: 980 - DNA, 1268 bp, Homo sapiens
gaccgggcttgtcggtgaagcggcagtggcggcggcggcggcggctcggcaggcgggttcaggcttcgggggccagccgccgccatgatcctgctggaggtgaacaaccgcatcatcgaggagacgctcgcgctcaagttcgagaacgcggccgccggaaacaaaccggaagcagtagaagtaacatttgcagatttcgatggggtcctctatcatatttcaaatcctaatggagacaaaacaaaagtgatggtcagtatttctttgaaattctacaaggaacttcaggcacatggtgctgatgagttattaaagagggtgtacgggagtttcttggtaaatccagaatcagtcttctaataggttgtctcaacattcatggccagaggaattgaaaggcaccgtgtcatccttgaatagaacagctatgttatactgctttaaaaaggaggtttaaagtggaaaaactgaacagcctttttaccctgtgattcagtggcatgtctcaaattctgaggcatttagcaggaccccaaagtgagaaccaggatacaatgtctctttgctatatgaccttgaaaatcttccggcatccaaggattccattgtgcatcaagctggcatgttgaagcgaaattgttttgcctctgtctttgaaaaatacttccaattccaagaagagggcaaggaaggagagaacagggcagttatccattatagggatgatgagaccatgtatgttgagtctaaaaaggacagagtcacagtagtcttcagcacagtgtttaaggatgacgacgatgtggtcattggaaaggtgttcatgcaggagttcaaagaaggacgcagagccagccacacagccccacaggtcctctttagccacagggaacctcctctggagctgaaagacacagacgccgctgtgggtgacaacattggctacattacctttgtgctgttccctcgtcacaccaatgccagtgctcgagacaacaccatcaacctgatccacacgttccgggactacctgcactaccacatcaagtgctctaaggcctatattcacacacgtatgcgggcgaaaacgtctgacttcctcaaggtgctgaaccgcgcacgcccagatgccgagaaaaaagaaatgaaaacaatcacggggaagacgttttcatcccgctaatcttgggaataagaggaggaagcggctggcaactgaaggctggaacacttgctactggataatcgtagcttttaatgttgcgcct

SEQ ID NO: 981 - protein, 186 aa, Homo sapiens
MLKRNCFASVFEKYFQFQEEGKEGENRAVIHYRDDETMYVESKKDRVTVVFSTVFKDDDDVVIGKVFMQEFKEGRRASHTAPQVLFSHREPPLELKDTDAAVGDNIGYITFVLFPRHTNASARDNTINLIHTFRDYLHYHIKCSKAYIHTRMRAKTSDFLKVLNRARPDAEKKEMKTITGKTFSSR
